United States Patent Application Publication US 2026/0109938 A1 - sequence listing, part 4

SEQ ID NO: 2 - DNA, 3979097 bp, Escherichia coli (residues 1,989,550-3,979,097 of 3,979,097)
  source 1..3979097: mol_type = genomic DNA
cgccatacccgcgggaatgaaattctctttattcctgcgctgtttattctgtttagtcttggcggcgcggtatttggtatgggagaagaggccgtcgcctttgccattatcatcgcaccgctaatggtccggctgggctatgacagtattaccaccgtcctggtgacctatattgccacgcaaatcggttttgccagtagctggatgaacccgttttgtgtggtcgttgctcaggggattgccggcgttccggtgctttctggctccgggttgcgtatcgtggtgtgggttatcgccactctgattggcctgatctttaccatggtgtacgccagtcgagtgaaaaagaatcctcttctgagtcgcgtgcatgagtccgaccgcttctttcgtgaaaagcaggctgatgttgaacaacgtccgtttacctttggtgactggctggtattgattgtcctgaccgccgtaatggtctgggtgatttggggcgtgatcgttaatgcctggtttattccagaaattgccagccagttcttcaccatgggtctggtgattggcatcatcggcgttgttttccgccttaacggcatgacggttaataccatggctagttcctttaccgaaggggcgcgaatgatgatcgcccctgccctgctggtgggtttcgccaaagggattttgctgctggtcggtaatggtgaagcgggtgatgccagcgtgttaaataccatcctcaacagcattgccaatgccattagcggtctggacaacgcggtcgcggcctggtttatgttgctcttccaggcggtatttaatttcttcgtgacgtccggttctggtcaggcggcgttaaccatgccgttactggcaccgcttggcgatctggtcggtgttaaccgtcaggttaccgtgctggcgttccagtttggtgatggcttcagtcacatcatttacccaaccagtgcgagcttaatggcaacgctcggtgtgtgcagggtggacttccgtaactggctgaaggtgggcgcgaccctacttggactgctgtttattatgtccagcgtcgtagtgatcggcgctcagttgatgggctaccactaaaaatgttaagagccgcaattgcggctcttttttcattctgccgtttcagtctctacggcttcatttttggcattgcgcttcatccacaacgctagcgctttcaggctgtctggagtgaactcatcgcagcgtgcggtgatttcttccggcgtcagccagcaaacttcactgacttcatcttcctgtagtgcgaagggaccgtgagagacgcagctgaacaatgcgccccagacacggcaatttttatcttcgaaatagaactgcccgtgctcggcaaaggggacaccggcaatgcccaactcttcttccgcttcgcgacgcgcggattccagcagttgctcatcggcctggactacaccgcctgcggtcgcatctaacatgccgggtaaaaagtcttttgtctcggtacgacgctggaccagaattttgcccatgccatcatgcacgacgatgtaagttgcacgatgacgcagacactgtgcccgcatttgttcccggctggcttgtgcaatgacttcgttctcttcattgacaatatccacccattcagtacttgccaaacgacgctgttccattatcaggaaaccttctttttctggcgctcttacggcgcattttgagttgtgggtaaattacggattaatcgcgacctgcgcaatgatactttgatcattgagtgcgattacactaagtacgtcattatccagcatgccataactcgccggattaccgcctttcggaatactcacgctgccggggttgaagtggaaaatctccccccgctgttctgccactggcagatgggtatgaccgtacaccagcacatcgttctggtttaaagcaggcagattttccgggccaaaaagatgaccatgcgtcaaaaacagacgttgtttttccagtaatacctgttgccacggcgcggttatcgggaaatgcagcagcatttgatccacttcgctgtcgcagttgccgcgcacagcgataaccttatgtgccacttcattaagccgttcagcgactttggctggcgcgtaaccctccggtaaagcattacgcgggccgtgattcaacacgtcgccaaggatcaccagccactgggcaccgctttgggcaaacaactccagaacacgttccgtcgccggtaagctcccatgaatgtcgcttgcaaacatcagtttcatcactcactcctcgtcgaaaaaacgtaagctatgatactggattctgtcgttgctatcagccagattgcttcgcgctaagtgcaataaaacgctggacagacgctcgctgccactggaatgttgcataatccaccaggcgttctggcacctcatcgccatgtagtaccaggcggttaatcattagcgccagatcagtatcagcaatgcaccattcaccaaataaattcggctgacccagtactaacaaatgttctgccatcgcgaacagtttctctgcactggcttttccctcggccgttagtggcgcttttttcgcccccgcaaagacaacatccgtcggacgctcttcgcggatgggcatcagatcgctgcgcagccaggcctgaatctgtcgtgcacgcgcacgattttctaaatcaagcggataaatacgttcccaggtcggtggcgcaaatcgatcttccagatactccgcaatggcagaagattcactcaactcaaaatcatcgatttgtaataacggcacacggcgtgtctgaccgtaaccttgccacgtcggctgcaaatgttcaccgctgtcgaggtcgatggtcttgatatgaaagctcaggcctttttcctgcaacgccacccaggcggataacacataaggggagaaaaagtgggcatcactccaaagcgtgatagcgggtttactcattatgtcctcggcaataaagggggctggctatcaaactatagagcctttttgtcactgtcacgtgacgaatactcacgtaagtcgccgcgctttctatacttgtggtgttcagatgattaaacaaccggagctgcaatgatcgatctctatttcgccccgacacccaatggtcacaaaattacgctgtttctcgaagaagcagagctggattatcgcttgattaaggtagacctggggaaaggcggtcagtttcgtccggaatttttgcgcattagccccaacaacaaaattccggcaattgttgatcattctcctgccgatggcggcgaaccgctaagcctctttgagtctggtgccattttgttgtatctggctgagaaaacaggactctttttgagtcatgaaacgcgtgagcgcgccgccacattacagtggttattctggcaggtaggcggactggggccgatgcttgggcaaaatcatcattttaatcacgcagccccccaaaccattccttacgctattgaacgttatcaggttgaaactcagcgtctttaccatgtactgaacaagcggctggaaaacagcccctggctgggaggcgagaactacagcattgcggatattgcctgctggccgtgggttaatgcctggactcgccagcgaattgacctagcaatgtatccggcagtcaagaactggcatgagcggatccgtagccgccctgccaccgggcaggcactgctaaaagcacaactcggtgatgagcgtagcgatagttaacagaaacaggttctcgtgtattatttcatcctaagtaaaacaacggagaacctgcaatggcacaacctgccgctattattcgtataaagaaccttcgtttgcgtacgtttatcggaattaaggaagaagaaattaacaaccgtcaggatattgttatcaatgtgacgatccactaccccgccgataaagcgcgcactagcgaagatatcaacgatgcgctgaattatcgcaccgtaacgaaaaacattattcagcatgtagagaataaccgtttctctttgctggaaaaattaactcaggatgtgctcgatatcgcacgtgaacatcactgggtgacgtatgctgaagtggagatcgataaactgcacgcgctgcgctacgccgatagcgtatccatgaccttaagctggcagcgttaatcgccatatcgggaggctgcatgaacatagtgatcaccggagggacaggattaattggtcgccatttgattccgcgtttgctggagctgggccatcaaattacggtagtgacgcgtaacccgcagaaagccagttccgttctcggccctcgggtgacactatggcaagggcttgccgatcaaagcaacctcaacggcgttgatgcggtaatcaacctggccggagaaccgattgctgataaacgctggactcacgagcaaaaagagcgtctctgccaaagccgctggaatatcacgcaaaaactggtcgatttgattaatgccagcgacacgccaccgagcgtactcatttccggcagcgcaacgggctattatggtgacttaggtgaagtggtggttaccgaagaggaaccgccgcataacgaatttacccataaactctgcgctcgctgggaagaaattgcctgccgggcgcaaagtgacaaaacgcgagtgtgcctgctgcgtaccggtgtagtgctggcaccggatggcggtattctcggtaaaatgctgccgccgtttcgtcttggcctgggcgggccgattggctctggtcggcagtatctggcctggattcatattgatgatatggtcaacggtattctctggctgctggataacgagctgcgcgggccatttaatatggttagcccctacccggtacgcaatgaacaatttgcccatgcgctcggtcatgcgctgcatcgcccggccattttgcgcgtccccgcgaccgccattcgactgttaatgggcgaatctagtgtactggtattaggtggacaacgcgcgctgcctaaacggctggaagaagcgggttttgcgtttcgctggtacgatttagaagaggcgctggcggatgtcgttcgctgatgtggtttacagcaaacatccgccagttaactcccggtgttacaggattagtggctttgcgcgataagatcgtctggactaagtcgggtcaccatcataactaactctctgtctaaacctctatccagcatctcctgagcaatacgcagggcttcttcgtgtttgccctgcattgcgccttcttcacgtaatctgtcagcaatggtcatcagtttctccttttcttgtggtgcgcgttccgctatctcaccaataaatgcacgaaaacgctgggcatcccctgtttgtaatacgtaattaaacagggcttttagctgtctgtcattagtgttccctgtaactagcaggctaacaatttggtcgactaatcccaacagatcgcgctgacgaatatgtttctgaattaactccaacagcgccattttgcggtgttgcataatctcgtcatccggcaccacggtaatatccaccaacggaaaagcgctactatatattttgcgggctatagcaggctcggcaaattcatcaagccagcagagactataaggataaggacttctgcaaccatgataaaacagcatcgggagcaccaatggaagctctttatagcccgcatcaagatggttttgcattgccgcaatggaataacgcatcatgcgaaaagccattaattcttccggcttactttggtgctctatcactacataaatataacccactccctcctgcgttttcacagaccacaagaggtcggaataatattgccgcaggtcttcatcaataaaactgtttggttccagtttaagcgtcgttaaatcacacagtttgcgcagcggcgcgggaagatgaatatcaataaaatcccgcgcggtgtctggatggcgtaaaaaagatttaaataccgcatcatgcggcgtggaagttgtgcttattgtcatggcgttccgtcacccctcaaatttaagatgacgcgacaataaccacgattaacacccaatgcagcaggcagtttttatctttggacagcgaattcagaagtatttttagcggactgtaacttttacatttcagcggaagctgactcgcaaattccccatgaaaatactccggcagcgttagccaccggagaggaaattatttcaggcttcccttaaggaaccgttgcagacgagggctttgcgggttgccaaataactgctccggcgcgccctcttcttctattttcccctgatggaggaaaatgacatgagtagaaacatggcgagcaaagcccatttcgtgagtcactaccaccatggttttcccctcttctgccagttgctgcataatacgcaacacttcgcctaccagttcaggatcgagcgcgctggtaggttcatcaaacagtaaaacttccggttccatcgccagcgcccgcgcgatagaaacacgctgttgctgaccgccggaaagatgcaccggatatttcccctgcgcacgttcgtctatcccgacttttgccagatacttcaccgcccgctcgcgcgcttcctgcttgctcaggcccaacacctgaatcggcgcttccatgacgttttccagcaccgtcatatggctccagagattgaagtgctggaataccatcgtcaggcgtgtgcgcagtaagcgcagttgatttttatcggcgactttgagttgaccgtctttgtcgcgcaccagattgatcgtctggccattgaccacgatgctcccttcactcggtttttcgaggaagttaatgcagcgcagaaaggtacttttcccgcttccgctgcttccgatgatgcttattacatctccggcattcgcttgcagacttacccctttcagcacttcatgttcgccgtagcgtttgtgcaaatcgataacgtttaatttattctcggacatcgtattctcagtgcgtactagaaggtttcacatgctgcaaccagcgtttttccgctctgcgaaagaggctgatcaggacataagagatgattaaatagagcaccgcggcaatgccgaaggcggtaaaaggttgatacgtggcggcgttaatatcgcgggctattttcagcagatccggcaccgtggcagtaaatgccaacgcagtagagtgcagcatcaggatcacttcgttgctgtatgccggtaacgcaatacgcagcgcagaaggcaaaataatgcagcgatacattttaaaagtgctgaagccataggctctggcggcttcaatttccccatgcggaacgctacggattgccccagcaaaaatctcggtagtgtaagcgcaggtgttaagcgtcagcgccagcacggtacagttcaggccactgcggaagaaagcgttaaggaattcggttcccttaacaatctcaagcgtgtacatgccggaatagaacaccagcaactgaacatacagcggcgtaccgcgaaaaatataggtaaataaccagattggaaactggatgtatttattactggagacacgaccaatcgccagaaacagcgccaggactccgcctatcactacgctcaaaataagcagccacagagtgatcgccacaccagtaaagcgataaccgtcggtccacagcagcggtttccagtattcatgtaagatttcgatcacaggtcagccctcttcacacccacggagtagcggcgctcaaggaacagcagcacaccattggaaacagtggtgaaaaccaggtaaatcacgccacagacgatggcgaaatagaacggttcccaggtacttttgcctgccagttgggtggctttgaccacatcttccaggccgagtaagctaaccagtgcggtagatttgaggatcacctgccagttgttgccaatgcctggcagggcgtaacgcatcatgctcggaaacatgatccgccgaaacacttgcccacgagtaaaaccgaacgccgtcgccgcctctatatgtcctttcggcactgccataaaagcaccacggaacgtttcggtaaaataagcaccgtagataaaaccgagagtgataataccagcgaccatcggatcgatatcaatctgcccgacgcccatcgcctccgtcaccgtgtttagcgcaatctgcaaaccgtagaaaatcagcagcatcaacactaagtccggcacgccacgaatcagcgtggtgtacccttcgaaaatcagcccgctaagccgattttggctgagcttaccgccagcgccaattaaaccgatgattacagcgagcactacagagctgatagccagctccagcgtgacgagcgcaccctgtaaaataacaccactaaacccatacaacatgctgcctgtcctgtcgtgtgtggtgaattaccgcctcttgtctccctccggttacccgaagggagcgggctttctttcaccgatggcgattagccaccataaacatcaaaatcgaagtactttttcgctaatttctcgtaagtaccgtcagcgcgcatttcggcaaaggctttgttcagtgcttcgcgcagttcgttatcttctttacgcaggcccatgccggtccctacgccaaacagtttttcatctttaacagacgggccaccgaatttgtaatctttaccgacaggttgtttgaggaaaccttcgctggcagcgacctcatcctggaacgcggcatcaatacgtccggcagtcaggtcagaataaatgttgtcctgcccctgatagctgacgatttcaatgccttttggtgcccaatgttcattaccgaacgtctcctgggtggtgccctgcaatacgcctacccgtttgcctttcaggctctcgactgtcggctgaatgtcagaatttttcgccaccaccaaacgagaatcggcagcgtacagtttgtcggtgaaggctatttcttgctgacgtttttccgtaatggaaaggctactcatgatggcgtcaatcttcttcgcttttaaggacgggattaacgcatccagcggattttcgacaaacgtacattgcgtattgatgcgtttgcataattcctttgccagatcgatatcgaagccaaccagttcgccttgactatttttactttcaaatggcgcataggtcgggtcggtaccgatgcggatgttttgcggaatcgcagcaaacgccgcagttgcgctggagaaggccagaaccagagagaggcttagcaccagttttttcataatgtcctcaactgacagtctttttatagggaatatttacaggtttgttacacttatcgtgccataaaattgaccatcaaggcaaaatatcccgccccgttagacgtattatttttcattaaaaatgcttaagtatgcatttcaatgcaccacgatagtgcaacaaacctggcgtgcaccatgatgatcattccatcaggtacagcttcccagcgacgtatcagtcaccgtagacattaaagtcgaaatactttttcgccatcttgtcgtaggtgccgtcctgacgcagctcgccaagcgccttattgaaggcagccgtcagttcagcatcatctttacgtagccctacaccggtgccatcaccgaagtattttttgtcttttacactactgccagcaaaggcgaaatctttaccagcaggttgcttgaggaatccttcgctggcagcaacttcatcttgtaacgcagcatccagacgtcctgcagccagatcggaatagaccaaatcctggttggcataggccaccacatccacgcctttactacgccaggtctcgttagcgtaagcttcctgggtacttccctgcagcacaccaacatgtttacctttcagactatccagcgttggctgaatcggactacctttggccgcaatcaaacgagaatctgcggcgtacagcttgtcggagaaggcaatctcctgctgacgtttatcggtaatggaaaggctgctaataatagcgtcgatttttttcgctttcagactggggatcagcgcgtcaaagtcactggcaacccaggtacatttcacctgcatccgtttgcacatctcgttaccgagatcgatatcaaagccaacaaaatcacctttagcatctttgctactgaacggtgcgtaggtggtatcggttccgatacgtaccgtctccggtagcgccgcatagctggaagccgctgtggagagaccgactaacaaagacagagcgagaatgctcttcttcatacataaccctcaagtgaaaatggcttttttatgttgtgtattgtgttgtgtgtttgcaggctctttcatgcaggtcttatgccatcttgacgacaacagtaacattcaacgttaaatatgttaataagacgttgcattattgtcctgaagttgaagatagcaggtatagcggttgaatcgcagcgtttcgattgaatggcagaaacaaaatgtcgaggatttgatcgcggttgcaaaattgccctgaaacagggcaacagcggagttatgcgccctgccagcgggcaaagagatcttcaggaagggttatcgcaaactggtcaagaacacgattaaccgtctgatttatcacatcatcaagggattgcgggcgatgataaaacgccggaacgggaggcataatcaccgcaccgatttctgccgcctgagtcattaaacgcagatggcctaagtgcaatggtgtttcacgcacgcagagcaccaacgggcgacgctctttcagcaccacatctgccgcacgggtcagtaagccatcagtatagctatggacaatgccggaaagggttttgatactacagggtaaaatcaccatccccagcgtctggaaagaaccggaagagatgctggcggcaatatcgcgcgcatcgtgcgtgacatcggctaatgcctgcacttcgcgcagagaaaaatccgtttcgagggataaggtctggcgcgctgcctggctcatcaccagatgcgtttcgatatctgtgacatcgcgcagaacctgtaataagcgcacgccataaatcgcgccgctggcaccgctgatgcctacaatgagtcgtttcataaatagttgccctgtcagacttgcaggcagactttgcaggatttcggcgggagttgcaagtcagggtgccagaccggcaccctcagcgaaggcatcatccttcgttatgcatttcgagattttccacttcgttctgacgttgcactgctttggcgtcatcattacgtaacgtatcgaggaaatcgaggtagccctgatcaacatctttggtgacgtagacgccgttgaacacgctgcattcaaactgctggatatccggattttcagcgcgaacggcgtcgatcagatcgttcagatcctggaaaatcaacccgtcagcaccgatgatctggcgaatttcatcaacttcgcgaccgtgagcgatcagttccgtggcgctcggcatatcaataccataaacgttcgggaagcgaatttccggtgccgcagaagcgaggtacactttcttcgctccggcttcgcgtgccatctcgataatctgctcagaagtggtgccacggacgatggagtcgtcgaccagcaggacgtttttatcgcggaactcggcgcggttggcattcagtttacggcgcacggacttacgacgcagctgctggcccggcatgataaaggtgcggccaacatagcggtttttaacgaagccctggcggtacggtttgcccagaatacgagcaatttccagcgcgatatcacagctggtttctgggatcgggatcaccacgtcgatatccagatcttcccattcgcgggcaattttctcgcccagtttcgtgcccatattcacacgcgcgctgtaaacggaaattttgtcgataaagctgtccgggcgggcaaagtatacatactcaaacaggcacggattgctgaccggattgtcagcacattgacgggtaaacaactgcccttcttcagtgatgtaaatcgcttcgcccggcgcgacgtcacgcaggaaatcaaagcccagcgtatcgagcgctacgctttcggaagcgaccatatattctgtacggttctcgtcaatatcacgttttcccagtaccagcggacgaatcccgtttggatcgcggaaagcaaccataccgtggccgataatcatcgccacacaggcatacgcgccgcggattaagcggtttgtggcagcaatggcagcgaaaatattgtcggcttccagcgggtagtggcggaagttgtccagctcgctggcgaagatattaagcagaatttcgctgtcggaagtggtgttgatgtggcggcgtttttcttcaaacagttttttacgcaactcgtgagcgttggtcagattgccgttgtgggcaagcgtaatgccatacggggagttaacgtaaaacggctgcgcttcagaggcgctggagctgccagccgtggggtaacgcacatgaccaatgcccatattgccctgcaaacgctgcatatggcgagcttcaaatacatcgctcaccagcccgttcgctttacgcaaacggaagcagttattggcatctatggtgatgatgccggcggcatcctgaccgcgatgctgaagcaccgttaaggcatcataaatgctctggttaaccggcataacaccggcgataccgacaataccgcacatacgtctttttcctcgttaagccacatctcagagcacttacgctctgggcaagaaactactgctgctttgcagataatcaaaaaaacatctgatgataaaactgaattgcgggatcagctgacttttgctccagtcttcgcttttgctcaccccggtaaaggagtcgagaaagaagagaatggcagcaacaatcaacacaccgcgcaacgcaccgaaacagacgcccagcacccgatcggtgccactcaaccccgttttctccaccaactggcctatcacgaagttcacgatagcaccaacgatcagggtagcgataaacagtaccgcgatggcaatcccatttcgaaccagttcgtcttcaaagcccgtaaaccagacactcaggtaagtgtagtaatgactggcaacaaagaaagcacaaccccatgtcaccaggcttaacgcttcacgaacaaagccgcggatcaggctaaccagagaggaaaaagcaatcaccgcgattatggcgtaatcaatccagaccatatgtgtcccacgattttacgccctgtcatcctgttcggggcgcattctaacagaaaaagaaaacgtttgcgtagggatttccttcccgcgcatcaataaaaatggcgctgaaaaaatattcaacgccatcgactttttatgcctttgcggcatcgggcaatgcgtgtcggatgcggcgtaaacgccttatccgacctacggttctacccctgcgtaggcctgataagacgcgccagcgtcgcatcaggcaagaccgtattaattcggcgtatagcccattaccacgccacttaagccagaaagttgcttcaactcacccaggctacctttcagcttatctttgctggcatccggcccaaccagaatacgggtaattttaccctgcactggcgtggatgggctcgtataaacccgataaccggcaccgcgcagcttaccgacaatctcattcactttatcggcatttttcagcgcacccagttgcacaacataggctttacccgtcggtgcagctttttcttccacgaccggcttcggttctggcttcggcgcaggtggtgcttcaacctttggtttaggcggctccaccggtttcggcttcggtggggcgaccggtgcaggttccggttcaaactcggtgttattggctgcaatagtggccggatcgaggctcggtgctgcggcatcacctgcccgcacctcttccgctgcgccttccggcggctgcgtcggtaacgcctgggtggcggctggcatcatatcaggctcatcacgatcgcccgctttcggcaccagcgggatagccgcgaactcatcctgataatgttttttctgcccgtccagcagccctggaagtacaatcacccccagcgccaccagcacgatcgtgcccactaaccgattctgaaacttacttgccaccgcttctcctcgcgtcaatcacttccatgacatgtgcgaccgtgtggaaagaaccacacaccagcacggtgtcttccgctttagcgtccgccattgcggcatcccatgcctgcgcaacgctatcaaaacttttgccgttacccaaatgctcaagcagttgttctgccgtggcaccgcgcggcccttccagtggcgcacaataccagtcatcaaccacgcttttcaaccaggccagagttccggcaatatctttatcatgtagcataccgataaccgccagcacgcgcccgtttttcggtagcgctttcatacgcccggtgagatattccgccgcatgtggattatgcgcgacatcaaaaataacgcgtgggctctcgctcacaatctggaaacgtcccggcaaaattgcgctggcaatcccgtcgcgaatggcattttcactgacttccagcccgctggcacgcagtgccgccagcgctgttgcggcattcggttgcgggacaagcggcaacggcagattttccagcgtgccgtgagcatcgctaaacgcccagtcatgatcggtgacggaatagttccactcaacgccccgacgttgtaacagtgcacctttttcctgcgccacatcagcaatggtagaaggcatttccggctcaccgacaattgccggtttttcgctgcggaagatgcctgctttctcgcgaccaatactttcgcgatctggacccagccagtcggtatgatccagcgcaatactggttactaccgcgacatcggcgtcgacaatattggttgcgtccagacgaccgcccagccctacttccagaatcaccacgtcaagttgtgcctgcttgaacagccacaacgcgctcagcgtaccgtactcgaaataggtcagggaaatatcaccgcgtgcgctttcaatctccgcaaaagaggcggtgtgggcgctttccggcaattcctggccctgcacacgtacgcgctcggtataacgcaccagatgagggctactgtagacgcccactttgtaccctgccgccatcagaatgctctccagcgtacggcaggtggtgcctttgccattcgtacccgcaacggtaaacacaaatggcgctggtttcaggacgccaagacgcgccgcgaccaggctcacgcgctcaaggccgagatcgatagttttactgtgcaggttttccagataagaaagccagctagccagagggctcgcggcttgaggagtgcgtttgataatcatggtatccgctgattcgttacggtgagaatagcaaaagggcagagccagtggccctgcccttatcagttatcaggcctcaggttcctgatccggtaccgggggtaccactacgccttcacgcggcgcttcaggattcggcgctggcagattcatcaacttcgccagaatgctcgccagtttcaggcgcatttccggacgacggacgatcatgtcgatcgcgcctttctcgatcaggaattcactgcgctggaatccaggcggcagtttttcgcgaacggtctgttcgataacacgcggaccggcaaagccgattaacgctttcggttcagcgatgttgagatcgcccagcatggcgaaacttgcagaaacaccgcccatcgtcgggtcggtcagcacggagatgtacggcaagccgcgctcctgcatttttgccagtgccgcagaggttttcgccatctgcatcaggctcatcagtgcttcctgcatacgtgcgccaccagaggcggagaagcagatcagcgggcagttatcttccagcgcctgctcaacggcacgcacgaaacgtgcacccacaacagaccccatactaccgcccataaaggcgaactcgaatgccgcagcgacaaccggcattccatacagagtgcctttcatcaccaccagcgcatctttttcgccggtttctttctgcgcagatgccagacggtctttatacttcttggagtcacgaaacttcagcacatctttcggctcaagctcgctacccagctccacaaggcttccttcatctaacaggctatgcaggcgattacgcgctgtcatacgcatgtgatggtcacacttcggacagacctcaagattacgttccagctcagcgcggtataaaacctgaccgcagctatcacacttagtccacaccccttcaggaatgctcgccttgcgggtgggagtaatgttgcttttaattcgttcaatccagctcattagggacctttctgtctgaacctggttcgatgccagttttatctttggggacgcataatgccatttttgcccccaacagaccatgaatgttgcacattaaaacataacagcccgaaactttggataaaaaagtggtcgaaccgcggagttactttttattttgcggcgcgtgccgcagcgcgtttgtgacggattatttcgatgacgcccggcaaaatagaaaccacaataatcccgacgatcagcagcttaaggttatcctgaaccatcgggattgtaccgaagaaatagcctgcgtaggtaaaaagcagtacccacaacagtgcgccgatcacgttataagcggcgaaatgacggtagctcatgtggcccattcccgcaacaaacggggcgaacgttctgacgatcggcacaaaacgggcgagaataatcgttttgccgccatgtttctcataaaactgatgggttttgtcgagataactgcgacggaaaattttgctattgggattactgaacaacttttcaccgaacaaccgcccgatagtgtaattgaccgcgtcacccacaatcgcggcgatcagcatcagcaccaccatcatatggacgttgagatcgttggtttccagacttgccaacgctccggcaacaaacagcaaactatcacccggtaaaaacggcgttaccaccagaccggtttcacagaacaaaattaagaacaaaatggcataaacccagacgccgtactccgcgaccagctctgccagatgcacgtcaatgtgcaggataaaatcgatgaggaaataaatcaggtccatatttgcctatgccttgtactcgtcatctttcaggctgtaactacgttggctacagcctgaaatgttccgagcattattctcgttagtccgccagaaatagcgggcccattggcggttttggaagatcataccggtcagggtaatccaccgcgaccagatacagcccttccgcttttgccgttgctgccgccagcgttctgtcctttgccgccagcaactctgctatccagctctccggctggttgtgggcaccgacttccatcaggctgccgacaatattcctgaccatatgatgtacaaaagcattcgctttaatatctaccaccacataaggaccgtgacgcgtgacattaatatgcataacgttgcgccacggggttcgggactggcactgcaccgcacggaagctggtgaaatcattctcgcccagcaagcattgcgcagcccgatgcatccgttcagcgtccagcggttcgtaaaaatgggttacccctttactcagtaccgccgggcgcagccgatgattgtagatgatgtagcgataacggcgagccgtggcgctaaatcgggcatgaaaatcatcaggtacagttttaacccaacgcacagcgatgtcaccaggtaaattcgcatttacgcccaaggtccacgccgcgtctttgcgcagcgcggttgtttcgaaatgcacaacctgcccggtaccgtgtacccctgcgtcagtacgcccggcgcagaagacggtgatgggttcgttcgccacctgggagagcgccttttccagcttctcctgcacactgcggacttcgttctgccgttgccagccgtaatacttactgccgtcgtactcaatgcccagcgcaattttataaactggcggttgttgctggtcggacattagtacagatactcctgcaccagtttctcggcgatttttactgccatcagcgcgccgccaaagcgaacgttatcggccacgctccagaactggacttgctccggcataccgtagtcattacgcacgcagccaacagaaagatgcggcgtaccgctagcatcacctacctgagttgggaattcgttctcttcagagagcacaatatcttcgccttgaacaaacgcatcacgcgcttcttctgctgccagtggacgcagagcttcaaagttgaccatctgggcatgaccgtagaataccggtgcctggacgacgctagcgctaatcatcagcccttcgtcctgcaggattttgcgtacttcgtcaacgatacgacgttcttcacgcacgctaccttcgctatccggcagtaacggcagcatgttgaacgccagctgacgcccgaagaaatcttcttcgtcaatcggaatgccgttgagcaatttcgcactctgccccgctaacgcatcgaccgcttttttgccctgggcggaggcactaatcaggctggtaacgctgatacgacttaaaccgccctgatcgattaacggtttcagtgccgccagcagctggctggtcagactgtctggtacggcgatgacattccggttccggtaatctgtcagtacaaacgggtttacttccggcaccaccagcggtacgtcgggttcgagagcaaacaatccactgctgtcgatcaccaggcaaccactgttggtcgcttcttcaacccaggcagcggtagcttctttgcctgcgacaaaaaatgccagctgcgcctgcgtccagtcgaattcagcggcatcctgcacggtgattgtcttaccaccaaagcgcagttgttcgcctgcgctttcgttacgtgccagtgcataaatttccccaaccgggaactgacgttcagccagcgtttcaagcagggcttcgcccacagcgccagttgcgcccaggacggcaatgttccagccttcagacatggtggtttactccagaaatagcaaagctccctgccaatgttacagcagagagcatgaagaagagattaacgtgccggatgatgaacggcgttaaaacccagtttacacagcaaacttgccgcactggcgtcatcacaaattacatacagagaactccattcacggcgctcaagatagtttttgcgcagtttatcgaactcacccggtatcccggcgactttacgcagcggtgcgtcatcgcggcgcacatcatacaccaaatgcaccagccttttcagcgtcggttgatcgagcgggccatgcagcgtaatgcgaccaaactctggcgcaggcagtaatgtatccagcgcaacgtgctgttcatgcccaataaacttgctataagcttcaaacacttgcgtagtaccgcgtgctttaccttccagggtatagcctgcgatatggctcgtgccgatatccacttttttcagcagctcgacgttgagttccggttcgccttcccagacatccagcactacgcttaacttctggccttcattcaggcaggtcagcaacgcagtattatcgacgactgcgccacggcaggcgttaatcagaatcgctccgggcttcaggctacggatcagtttttcatccgccagatgtagcgttttgtacggaccatctttaaagagtggcgtatggaaagtcagaatatccgcgcgctggactaactcatccaggctgcggaaatcaccctcatccccacggtcggcgcgaggcggatcgcaaagtaaggttttaatccctaacgcttccagtcgcgcctgcaatcgacgtccaacgttaccaacgcccacgatccccaccgtacggtcgtacagactaaatccatcgcgttcggcaagcatcagcagggaggagaaaacatattccaccaccgcaatcgcattacagccaggtgcagcggaaaaaccaattcccgcctgcttcaaccatgcttcatcgacatggtcggtccccgcagtggcagtgccaacaaatttaatgggttttcctgccagcaaagattcattcactttcgtgacgctacgcaccatcagcgcatccgcgtctgccagttgagcgacggggattggacgcccgggaaccgcggtcacctcacccaaacggctaaataagtcgcgggcataaggcatattttcatcaacaaggattttcacgtttgtgttacctgtatgagacgagagttaaccggacaagtgtgccataatctcgcggccaggcatacttgcgaagatttcaggtataaggatacgtaatgatacaacctatttccggccctcctcctgggcaaccaccaggtcagggagataatctgccgtctggcacgggcaatcagcctttatccagtcagcaacgtactagcctggaaagcttaatgacgaaagtgaccagtctgacgcaacagcaaagagcagaactgtgggcgggtatcaggcacgatattggtctgagcggagatagtccgctgcttagccgtcacttccctgccgctgagcataatctggcgcaacgtctgctggccgcgcaaaaaagccattctgcccgccagcttttagcgcaattaggggagtatttacgtctggggaataatcgtcaggcggtcacggattatatccgtcataactttggtcagacgccgctgaatcagctcagtccggagcaattaaaaaccattctcaccctgttgcaggaagggaagatggttattccgcaaccacagcagcgcgaggcgaccgaccgtcctttattaccggcggagcacaatgcgctaaaacagctggtgaccaaacttgcggcggcaacgggggaacccagcaaacagatctggcaaagcatgctggaactttccggggtgaaagatggcgagttaattccagcgaaactgtttaaccatctggtgacctggctacaggcgcgtcagacgctaagccagcaaaatacgccgacgctggaaagtctacagatgacgctaaaacaacctttagatgccagtgaactggcggcgttaagcgcatatatccagcaaaaatatggtctttctgcgcaaagtagcctttcttctgcccaggccgaggatattcttaatcagctttatcaacggcgggttaaagggattgatccgcgtgttatgcaaccgctgcttaatccttttccaccgatgatggacacgttgcaaaatatggcaacgcgtcccgcgctgtggatactgttagtcgcgattatcctgatgctggtctggctggttcgttaaccccgacgaaaactcagtatcgtgacaataatacccagcaccgcagagatcgccccggcaagaaatacgctagagtaaccaaacgtggtcgccagcattcccgccagcggcccggagacgccgagggcgatatcctgaaacgcggcgtaaccgcccagtgcggtgccgcgaacttgactggggacgcgtttaaccacctccacgcccagcgcaggaaagataaggctacatccggctccggttaacgccgcgcccgctaatgcgacccatgcacctggggcttgccagagcagcaacaagcccaccgtttctacaagcagagagacaatcgccactttcacgccgccaaaacggtccggcatccagccaaacatgacgcgcatcacgacaaatgcgccgccaaacgcggtaagagtaaagcccgccatcgcccatcctttgctggcaaagtagaggctaacgaaagtcccgataacagcaaaaccaacgccttgtagtgccagacctaaccctggtttccagataagcccgacaacgctccacaggcttggacgttctcccgccagggccggtactttgcgcactgtgccgttacaggcccacgccagtacgggtaataccattgtggtgatcgccagtgcggcaaaaccgtaatggctatgaatcaacaggccaagcggagcaccaacagcgagggcaccgtaaatcgccattccgttccaactcatcactttgccagagtgttttggccctacgatgcctagtccccaggtcagagcgcctgtcagtaactggctttcaccaaagccaagaatcaaacgcccgacgaccaacagagcaaatttgaacggtgcggagacaggcaaaatcgccgccagcagcaacgcgccgccagccagaccacaagctaacattccctgaagcgcgctacgttttgcaccatattgatcggccagtcgcccggcgtaaccacgcgtcagcaccgtagccagaaactgaatcccgacggcaatgccgaccatggtattgccatagcccagttcatgatgaacaaacagcgggataaccggcaacggcaaccctacggtcatgtaggtgagaaaaaccgcaaaagcgatgcggaagaggctaaaattggcagaagatcgtgtttcggtttggcttacagcagtcatgcattactccagaatgcagcgcaaggcgaggagtatccccgtctcatctctctggtttcagggttacggtgcgttggcaggatttaacgcgtacgtcttttcagaaggaaatcgacaaagcgggaagtttgcctggaactggcggcgattgtcaatgatgtgaaaaagggaaccatcaggttcccttttgcgttagtgccggaggccgcattggcgcgtaacgtcggatgcgacgctggcgcgtctactccgacctactgcgaattaatctttcagcttgcgcattaccagcgtggcgttggtgccgccgaagccgaagctgttagacataacggtggtcagttcgcgatcggtcgtttcggtcacgatgttcagacccgcagcctgctcgtccagctcttcaatgttgatgctcggggcgataaagccgtgttccagcatcagcagagagtagatagcttcctgtacgccagcagcgcccagagagtgaccggtcatggctttggttgcagaaatcgccgggctcttatcgccgaacacttcacggatagctgccagctctttcacgtcgccaaccggagtgctagtaccgtgggagttcaggtaatcgattggggtatcaacgccatgcatcgccatcttcatgcagcgtactgcgccttcgccagacggagcaaccatgtctgcaccatcagaggttgcgccgtagccaacgatttcagcatagatgtgagcaccacgcgccagcgcgtgttccagctcttcaaccactaccataccgccgccgccagcgataacgaaaccgtcacggtgagcgtcgtaagtacgggaggctttttccggggtgtcgttgtatttagtagacagcgcacccattgcgtcgaattcgcaagccatttcccagcacagctcttcgccgccgccagcaaacacgatgtcctgtttgcccagttggatctgctctactgcgttaccgatacagtgtgcggaagtcgcacacgcggagctgatggagtagttaacgccatgaattttaaacggggtggcgaggcaggcagaaacgccggatgccatcgctttggtgaccacatacgggccaaccgctttcaggccgcgcgggccgcgcattgcgtcagcgccgaacacctggaaacgcggggagccgccgccggaacctgcaatcaggccaacgcgcgggttattctggtaagcttccggagagaggcccgcatcagcgattgcctgctccatagaaaggaatgcataaatggatgcgtcgctcataaagcgcacaactttgcggtcaatgaggccagtggtatccagttttacgttgccccagacgtggctacgcatgccggaatccttcagctcctgagagaaagtgatcccactacgtccttcacgcagagatgccaggacttcctgctggttattaccgatgctggaaacaatgcccaggccagtaatcactgcacgtttcattcaatacctctgtaagtcgcacatagagtaagtttcgaatgcacaatagcgtacacttgtacgccgaacaagtccgatcagccatttaatagagaaatttgcgcagccttacacacatcgctaagatcgagccaccgcctgtaagacgagtaacttacgtgaaacactactccatacaacctgccaacctcgaatttaatgctgagggtacacctgtttcccgagattttgacgatgtctatttttccaacgataacgggctggaagagacgcgttatgtttttctgggaggcaaccaattagaggtacgctttcctgagcatccacatcctctgtttgtggtagcagagagcggcttcggcaccggattaaacttcctgacgctatggcaggcatttgatcagtttcgcgaagcgcatccgcaagcgcaattacaacgcttacatttcattagttttgagaaatttcccctcacccgtgcggatttagccttagcgcatcaacactggccggaactggctccgtgggcagaacaacttcaggcgcagtggccaatgcccttgcccggttgccatcgtttattgctcgatgaaggccgcgtgacgctggatttatggtttggcgatattaacgaactgaccagccaactggacgatagcctaaatcaaaaagtagatgcctggtttctggacggctttgcgccagcgaaaaacccggatatgtggacgcaaaatctgtttaacgccatggcaaggttggcgcgtccgggcggcacgctggcgacatttacgtctgccggttttgtccgccgcggtttgcaggacgccggattcacgatgcaaaaacgtaagggctttgggcgcaaacgggaaatgctttgcggggtgatggaacagacattaccgctcccctgctccgcgccgtggtttaaccgcacgggcagcagcaaacgggaagcggcgattatcggcggtggtattgccagcgcgttgttgagcctggcgctattacggcgcggctggcaggtaacgctttattgcgcggatgaggcccccgcactgggtgcttccggcaatcgccagggggcgctgtatccgttattaagcaaacacgatgaggcgctaaaccgctttttctctaatgcgtttacttttgctcgtcggttttacgaccaattacccgttaaatttgatcatgactggtgcggcgtcacgcagttaggctgggatgagaaaagccagcataaaatcgcacagatgttgagtatggatttacccgcagaactggctgtagccgttgaggcaaatgcggttgaacaaattacgggcgttgcgacaaattgcagcggcattacttatccgcaaggtggttggctgtgcccagcagaactgacccgtaatgtgctggaactggcgcaacagcagggtttgcagatttattatcaatatcagttacagaatttatcccgtaaggatgactgttggttgttgaattttgcaggagatcagcaagcaacacacagcgtagtggtactggcgaacgggcatcaaatcagccgattcagccaaacgagcactctcccggtgtatagcgttgccgggcaggtcagccatattccgacaacgccggaattggcagagctgaagcaggtgctgtgctatgacggttatctcacgccacaaaatccggcgaatcaacatcattgtattggtgccagttatcatcgcggcagcgaagatacggcgtacagtgaggacgatcagcagcagaatcgccagcggttgattgattgtttcccgcaggcacagtgggcaaaagaggttgatgtcagtgataaagaggcgcgctgcggtgtgcgttgtgccacccgcgatcatctgccaatggtaggcaatgttcccgattatgaggcaacactcgtggaatatgcgagcttggcggagcagaaagatgaggcggtaagcgcgccggtttttgacgatctctttatgtttgcggctttaggttctcgcggtttgtgttctgccccgctgtgtgccgagattctggcggcgcagatgagcgacgaaccgattccgatggatgccagtacgctggcggcgttaaacccgaatcggttatgggtgcggaaattgttgaagggtaaagcggttaaggcggggtaatctgctctcgcagtgtttgccggatgcggcgtgaacgccttatccgacctacgtgtgacgtgtaggcctgataagacgcgataagcgtcgcatcaggcatgctgctccagacgccgcaacttactgctgactcgcctgctgaaacaggttttcccacatatcggtcaccagcgcctggtcacgcgggctcaattcaccagcaccaatggctttttccagactctggctaacggtcgtatgcaccgcctgagcggagtggtcatcaccactttccagttctgcgatggctaatgtcaggtggccacgcaaatacccactggcaaacaactcatcatcactggcatggtcaaccataccgtcgattaatgccagaatgcgactttcaaactccgcgatcatcttctttcctcattgtaaaacgtggcgctggcttcagttgagcgcttccggccacgggaactgttccgccgtaagttccggcgtgtgataataattttgtagtgctttaatgaagcgtgccggacgttccggaatgccatttgtcagataatccatcacctgcgcatgtactcgccgttgaaacaccacacgatccggttcgaaatccccttccagattgtcgcaactgacgttaaacggatatcccgccgccacacagaacaaccagtcgagcgcctgcggcttcacttcaacatcttcaaactggctttgcgtttgggcatcgcgtccgtccgggcaataccagtagccgaaatcaaccagctcacggcgcgctttcccggcaatacaccagtggctaatctcatgaattgcgctggcataaaagccatgagcaaagacgattcggttatacggtacttccgcatcagcaggaagatagatcggttcgtcgtcgcctttaatcagacgggtattaaaatcatcggcaaagcagctattaaaaatttcaatcaactgctcgtagtggtgtgtactgttcattagttcatccccaaccagtggaggatctcctgtccgtggctgtcgtaaagtaatttggcactcatcaccgcgctgacgataacaatcatcgggcggatcagcttttgtcctttgctcaacaccagtcgactacccatgcgcgcgccgaggaactgccccaccagcatgacaaagcccgtcgcccaaatcactttgccgccgagaataaacagcagtaaaccgccgatgttactcgttgcgttgagtaatttggcgtgagccgtggctttggcgaggttaaatccgcacagcgtaacgaaggccagcgcgtaaaagctcccggcagccgggccaaagaatccatcataaaaaccgacgcagccaccggctattaacgcgaagggtaaaccgtacatccggcgctggcggtcttcttcacctagctttggcatcagcaagaaatagaggccgatacaaattaccagaatgggcaaaatctgccgtaagacatcagcctgaacgtattgcaccagcagtgcgccgctcatactgccgacaaaggtcatggcgatattgagtttctgatcgcttaaactaaccactttgcggcgaataaagtagatagtagcggaaatagagccgccgcaggcttgcagtttattggttgccagcgcattagcgggagacatccccgctgccatcaatgccggaatggtgagtaacccaccgccaccggcaatgctgtcgataaatcccgccagcatggcgacaaaaaagagaactcccagcaacagcggggaaaccataaacaggctattaaacgtttccattagatcacgtgctcatccagtagcgcctggcaggaaggcggcaacggaggcggtgtcttcttctcaggctttgttgttcccggttttggaggttcaaaccagctttgcagttctgccccgcaaccatcgccacttggcggtaaaggttgatcttcacactccagactatcggcagggcaacgtaatcgtacatgcatatgcgcgcgatgctggaaccagggtcgcactttgcgcaaccagtcgcgatcggtgcccgcatcaaggcaaagttgttgtttaatcgccggattaacaaaaatgcgcgtgacgtctttgtcctgggcggcgagtttgatcaagctgaaaatttctggcttccacagcgtggagacaacgtgtttaccgtcgcgggaaactaagtccagtgcttgcgggcgcaagagctgcgcggaggtccagcgagttttcggcagttgcagaaagatatcgacatccagtccggtctggtggctggcatgaccgccgttgaaacgcccaccagcgggcatccccatatcgccaatcagcaccgtacccatgcccagattgctcacctggctactcagacgctggataaacatcaccagatccgggtgaccgaaatagcgacgctgatcggtacgcatgacctgataatgttcggactgtatcggcagcgtgtcagcgccgacaatacagccattagaaaaactgcctatgctttgtgcgctacccggcacaggttgggttattttttgccacggcgtcgctgccaggctggcgctactggcaagcagagccagcagcgcaatcgcggttttattcattttttaccagcgtggaatatcagtcttcacatcggcattttgcgcccgttgccgtaacaggtgatccattaaaacgatcgccagcatcgcttctgcgatcggcactgcgcggatcccgacacagggatcgtgacggcctttggtgatcatctcaacttcttcgccaaagcggttaatggtacgacccggcacggtaatgctggaggtcggtttcagcgccatatgggcaatgatttgctgcccgctgctgataccgccgagaatgccgcccgcatggttgctctggaaaccgtctttggtgatttcatcgcggttctggctgccgcgcagcgccaccacgtcaaagccgtcgccaatttccacgcctttcaccgcgttgatgctcatcagcgcatgggcgatgtcagcatccaggcggtcaaagaccggctcgccaagtccggcaggaacgccactggcaacaacggtgactttagcgccgatggagtcgccctcttttttcagcgcacgcatcaactcgtctaacgcgtcgattttgtcggggtccgggcaaaaaaacggattttgctcgacctggctccagtctttgatatccagcggaatgtcgcccatctgggtcaggcagccacggatttcaataccaaatttctcggcgagatattttttggcaatagctcctgccgccacgcgcatggcggtttcgcgggcggaagaacgtccaccgccgcgataatcgcgcagaccgtatttttgttcgtaggtgtaatcggcatggcctggacggaaaacgtccttaatcgcactgtaatcctgagagcgctggtcagtgttttcgatcaacaagccaatgctggtgccggtagtaacgccttcaaaaacaccggagagaattttgacctgatccggctcgcggcgctgggtggtatagcggcttgtcccagggcgacgacggtcgaggtcatgttgcaggtccgcttccgtcagcggaatgcctggcggaacaccatcgacgatgcagccgagcgccagcccgtggctttcgccgaaggtggttacgcgaaagagttgtccaattgtgtttccagccatcacggctccgttattgttgtgtttgcgtgtttacttaatctttataaatcgcgaaatgttctcgtgcggcaataagctgctctttggtgagcataaacacaccatcgccgccgttatcaaactccagccaggtgaacggaacatccggatattgttccataagatgtaccatgctgttgccgacttcacaaatcaacacgccatcatcagcaaggtaatctgccgcgttaccgagaatgcgacgcgtcagtttcaggccgtcagtgccagatgccaggcccagttccggctcgtggcggtattcgtttggcaggtcggacatatcttccgcatcgacatacggcgggttagtgacaatcaggtcgtactgcactttcggcaagtcgcggaacagatcggaacgaatcggaatgacgttgtggatcagaccgtgttcttcgatgttctgttcagcaaccgccagcgcgtctggagagatatccaccgcgtcgacttctgcatccgggaaggcataagcacaggcaatggcgatgcagccgctaccagtacacatatctaaaatatgctgcggttgcttgctgataagtccggcaaatttattgttgatcagttcaccaatcgggctgcgcggcaccagcacgcgttcatcgacgtaaaattcatggccgcagaaccacgctttgttggtcaggtaagccaccggaatgcgttcattgacgcggcggatcacgcgttcaacaatacggtgtttttcgctggaggtcagacgcgcggtgcgcatatcttccggaatatccagcggcaggtagaggctaggcaacaccagctgtacggcttcatcccacgggttatcggtaccgtgaccgtaccagatatttgccgcgctgaagcggctcacgctccagcgcaacatgtcctgaatggtttgcagctcatttactgcttcatcaacgaaaattttatccacgtattcctccagggcatgatcgcaataatttcggcggctagtttgccatgaagatgacgataaatcagcattcacgcgcggtgagtgaggaaaaatacgtttaaaacgatcgattgcgctacgagtcgggtaaactgtaggaaaattagaaatagagacagataaatgaaaaagaaaacaacacttagcgaggaggaccaggctctgtttcgccagttgatggcggggactcgcaagattaagcaggacacgattgtccaccgaccgcagcgtaaaaaaatcagcgaagtgccggtgaaacgcttgatccaggagcaggctgatgccagccattatttctccgatgagtttcagccgttattaaataccgaaggtccggtgaaatatgttcgcccggatgtcagccattttgaggcgaagaaactgcgccgtggcgattatagcccggagttgtttttggatttacacggtctgacgcagctgcaggccaagcaggaactgggggcgttgattgccgcctgccgccgtgaacatgtgttttgcgcctgcgtgatgcatgggcacgggaagcatattttgaagcaacaaacaccgctgtggctggcacaacatccgcatgtgatggcctttcatcaggcaccaaaagagtatggcggtgatgcggcgttgttggtgttgattgaagtcgaagagtggctgccgccggagttgccctgaggagttgagcgcgttgcgccaggtacgggtaatggcaggggcgaatgcccctgcctggtgtatctaagggttacaactcattcagtatgtactggaaccggcaagtagaatcgattggctgcatactgctggtatcaacacgcacgaccatatcgtgtaactgtttgtccgttatagggtgtcgatttggcgtgacgctgacttccgccttgtcacatccgctcgcggtaaaagttatcatctgtgcaacccagcggcagtaaccacctgtttcattcatctgcgtactgtcgcacaacttcccatctttcatcaaatacgtactaagcgttttctcaaccacaccgcccgtgctctgcagggtgagcagtttactcttactgacataattctcattccaactaacgtcataaggttgaacagaaacggatggacaaatcgtgtcgtgactatcaggcccctgatacgtcacgccccctggagaggcttcagagtcattcataataaccaaccatggacaagaaaagtaagattcaatctctgcagagacaataacctcaaatgtataatacccgcagttccacccagacggtaatccaggacaacttgctttgttgatattttgatggtagccaatcagcttaacgctaggggcaggaggaggaccactccagctcacattttgcaatatttccccagtcatgagccattgactacttttatattcaccaacgtacactgcggatggcatcattatttttaaattaaaagtcgcaatattacggctatcaccgttgtaaccgtagtaaacgtcaacgctatgcccggcagccatagcttctgtagtagcaataagcatgaccagagcgaacaaccatcgtagtattttcattttaaatatactcaaatgtcgcagttaaagaggcggtaaattcaccgatcgtcacatcacggccgcttttcgcctgtagccaggctctgaaattgatatcgttattgccattggttagcgcaaaggtcgccccatttgtattgttgatggcaacctgcattccgtcggttttttccatgccaattcccactccctgagcggtactactcgtatccagtgccagaaaaccgggttgttcgctgtcttctacccccgtgagcgtgacttttacgttgtatcccgccggccctttgcaatctttcagcttaaagactacgggtacacgagcggactggcctgcaacgttcaaatcctgacgactgaccgtgggaaagcgcacctctgccagatattggccatccaccaccagcgcacaggatttacttaataaattaccggagaaatgcagattattatctgccgcgaataacgtgctactcattgccaatatcagccccgctaacaggacgtaaccaccggactgaatcatacttttattcattgataatccacccgtaatgttgcgtaagcgctaaaattcgtatcgcttaacacagcatcactcgcttttaccggtacggcctccagcttcggcttttgcgtaaaatcagtggcgttgatagcaagcggagtattgagtttaaaacgctgaccatcgtgctgaagctcgataccaaaaccgggtacatcagtttcaattgctgcatcattaaaactggtttgtgtaccagtccaggtgagggtcatctcccaatctggatgacgggtcgtgctgtcacaagtgagttcatatggcacctctttacgaccatagttgccgttgatgtcgtcgataatgagatcgcgaaattcgacttcaatggttttaccaccgctgatgctacaggttggcggactcaataatgtcccgtgaaaggtgatgtcttcatcagcagcatgagctatggcgctactgacacaaagcagggttaagaaagtctttctcattgatagtccaccaccatggtcaaactggcgttaaactcgcccgcagcaagttgcgccccgcttgccttcacaggtacagccttcaactgtggctggttattgatattaaatggcgtccagctattttcaccgacggcaaacaaactgttatcggcgctattttctatccgaatgcccagcccggtgatattggtactgagtaccgtttcgccgttaatcgtactggtattgcccttaagttgcatccgcaagtcgttagcaagactgtttgtgcagttcaacgtgtatttcgcatcttgccgataattggtgccatcaacgttatcagcaatcatattgccgaactctacctggctgcccttgatactacagggtggcggagcatcgaccaacacgcgcagaattaaatccacgggtttactaccagccatagcagataaactacagacactgcataccagcagccctgcgcccactacaaacttttgactcataactccccccgtcatcagcctttgcggctctgctcttcatccacctggcagctgttgccattgcactggaagaacagcggcatccgtgcgccaaagtcgttgacgtaagtcagcaccggtacgctatccattttcacattcagcggtaccgtggttttcggctcaatgaccagagggctgaaccctgcagctggattaccgtttttctgcgcactggcgttgctgataatcacgtagtacggcgttgggttattgacggtaaatgcctgaccgctgcgggtgagcgtcaccttgtgctgccacggacttttcatactgaccttttccagcgcctttggtcgccagaacaacttgatacgcgtttgcagcgcgatttgcagggtattgggtttgttactttttggcgggatctcgcgcacgttaaagtagaacatgctttcacgatcggctggcaatttgttgatatccggcattccctgcacttttacctgcccgttcatcatactatcgatgcgttgcactggcggcagcacagttaacgggctggtgatcttgttacccttttcatcttcaatccagctttgagccagataagggagtttcggatcgttattacgcagcgtcacgctgatacttttgtcgctttcattaaatatcaaacgggtacgatctggcgttacagacgccagggcagacaaactggtagcgctaagcagtaacgccagcgtcatagcacccaatttggcagagcaaagtaaatcagacatggatcattccttaatcacgttattggttagcactaacagaaacagggggatcggtgggtgtcacctgttgcgtctgctcctgaatgacaggctttatgtcatcaggaacaaccggcgcgacgttgcctttatgctggcatggcagtaacaagccgttaaacagatcggcaggcagcgggtccggcaggttgatatcgcaatgcgcaacaccactccagaacacactcatatgttcgccaggtttcaccccagccagatagacactaccgtcatcatcgacaaggcccactgtctgctcgttatcattttttacttctgcgccaaacggtggatggctgccatcttgtaaacgcagcaccgccatcgctttttgaccactgatgacggcaaatttgcggtagccaatggctccttcagttagcgtggcttgcaccacgctctgggttgcttcggcgttttccggcaatttgttgaggtcgatatacgcctgattgcgataataattgttaacgtcagaaacgacggctttaccaaacatattggtataaacagcagccccgttaccttccaccggaacatcggcaacgccatcggcatcaatcagcaggcgtgtcccgcccatattctgggtacggtgaagtgcgccgccgtgggtagtaagcgttgcgccgccctgtaagctcaagcccgcagaggtgtattgcccttcatggtagttcgcactgaggtcaacctgcgccaggctaccatcatggctgtagtagccatcaacgctggtgtgtttgtcactggtgccgatgttcaactgatagtgagtcgcgtcatcgacacggctaaaataaccgacctggctgctgtccgtcccactgccatagttgccgttatagctaacggtactgttgtcgccccacggcatactgagcgaaatttacatgcccttatccgcccggttgtcatactcgtagcggtagccagtcagggaaacgctcatattacgaatgctgcccatattgaaatagtgggagagcatgatgttgtagtttgtctgctcctcacgatcccagtaggtatggcgggtatagttgagataaacgctaacacccgcatcgcggaagttctggttataagtggcggtgtacatctctttgtcgttgcccgtacggaccatttcgctgtcactggcatccagatactcgctcatggtcataaagttctcttcgctgaagcgatatccagcgaaagtgacgcggctgttgagctggtcaaagtctttggaataactcacacggaaggagttaccgtccaggctacctttgccataagcggtgtctttatccagtttggtatggctatgagtaacatcaaacgcgaccgcgccgaaggtagacaaatcgcgaccgacgcccagcgccgcagactgatagttttcatcacccagcgcaccgccatataagctccagccgttagcgatgccccaggaggcttcagcaccagagaaaaatcccccctcgacatggtggccccactcttgcggacgtcccatcatgatcttatagcgaacctggcctgggcgagtgaggtatggcatgctggcggtgctgatgtcatattcctgcacctggccgttctgttcttcaatgcgaatatgcaacgtaccggagacggaatcaccaagatcctgaatacgaaacggtccagccggaacctgcgtttcgtaaatcacacgccccatctggctgacggtcacttttgctgtggtgtgtgccacgccggaaatgtctggcgcgtagccgcgcagattgggaggcaacatttgatcgtcagtgctgacactgccaccaacataattaaaaccgtcgaaaatatcggaattgaggtaatcttcgcccagcgccagtttggcttttaaactcggtaacgcccgccaggcataatagcgactccactcccattttttttgtgtgtcatcgccgccaaattcatcgtcatcatcattactgcgcgtatgttgatagttggtctgccagtcagcgcgcatacgccatggccccaggttaaccccgaccgtcccgttgccgctgatctcgttactgtcatcgccgccattttcttcgtgtcgtgtttgcgcagtgatgctgtagtccgcaatgatcccggagatgccatcatcccaacgagaaggtggatcccagtcgggccaggtatattcgaggtaagcctgcggtagactaatgactaatgcggactggcttaaatcagccttaatttccacgccttccagttgaccgggcttcaggcatttaccatcgtggctccattgcagatttttcgccacgtcttcttttaaaccaaactgcgccaccagttccggtgtcagacaagcatagcttttgctaacgtcatcttcaccagcataccagtaaatatcgtactcttccgccaatggctgtttatttagttgaacctgtaaattgtattttccgggctcaacatacccctggctggaaaaacgcttcagatcaatttttgtgtcgccttttaattccagaaaacgggaatcaaactgaatgtcgtcttcagcccagacactgctataactcccactcattgccagcgcaatgcaccacggaagaatccgtaatcgaaaaagagaatggtcaggcatacacgtttttatccgtttttattcttgttcggtcaaaatccatttaaataccccatagcagtgtcgctatgggggtatgccttacaggtaagtaatctggaaggtggtatttgcttcgaaattacccagatctggcgcatcagctgcgccgaccagccaggctttaaagttcagagtctgcttcgctttgcctttattagtggcagtatctttcacgattttctggtcaatacccatgccgcttttgtaagaggtacccagagagtcaccgatcgccaggctaacattgttaaatgccgcaccggtatcggtattgaaaatggtgtaataattgccgctatttgcagaagaaacggtaccagtaaaggtagtggtcattgtttcctgagtatcaaatacgcaatcttgcaggcgaatctggaaatttttcggcgtggtggtgccgttatttttcagtttttcggcaccgatatcacccatatcaacttccagtttgtgatcgtccggaacgatagaacacacactgtcttcaatggtgccgtaaaaacgtgcagtaccgttgttacccgcagcgattgttgccgtagaggtgaacgcgcccatcaccattgccgcagcaatagctgttttaacaaacttactcattatttgtccttaaactataaataattaaaatataaacattgcaatacattgattcagtcaatagccaatgtttatacccagccattgaatacggcatgcgatccaaaaaaacaggtcgtaaaaaatgtattcgttggtgtggggtcgaatagtgatgttttcactcccctgattcaatttaattttactaatgagtaaatgtagatttaattaatatattgataggggaaagattatcttaaggatcttctaaaaaaacacgaaatatatatttagaaaaaacaggaagcatatcaacaatgaatgccaatagcttaaaaaacaaacaatgaacatataatgcgattggcattaacccgcttttgtcgatataatatataaacactatagccagaatttaatcaagtttcaattacgtcctgcctgattattcaactctattttctccattatctgtattaataaatgataatgagtgtcaaacagacattattcatttcaacatgtaactttgggcaaaatcaagatacgcgcagaagaatactttccgaatgaaagttaaaggtgttttatttatagatggggagagtcttcgatagtagtgaggttgacagatatccgctgcctgatgagcaattatgcccaatgaatctacctcattgggcataatttggaactcatcagatagcttttgccatcttcagattacacgggctcatctgccagttgaatgtgccgtttccgctttcatcaagcgttacgctggcaatggcgctggtggtaaacataggcggcgtttcgcccggacataactcggcaaccagatacccgactaacggtaagtgagagatcaccagtacgctagcaacaccttcattggtcaacgcctgcaaataggcactgaccagaccaacatcgccgcagggcgttaactccggcagaacttctgcactggaaggcaggttcagacaatcccctacttcttccagtgtttgctcggctcgcaggaacgggctcaccagaacgcgttcgatttccactttttgacctttcagccagttcgccatcaggcgagattcgtcacaaccattagtggtcagaggacgaacggaatcactggcggcatcgagggctgcgtcgccgtgacgcatgataaaaacttgcatattgcaccgcttttgttaaccagattcgcccgttttctttcatctgaaaccagagaaagaaaacggtggccggcattgtgccttatccattcaccgaatgaaacgctgttttttacctcaatggcgtaagtatagtcaatatgcgtttacattttgaccaacactccgccattcagcgcggattcatatagctttgaccttcttattgcaggtcagttgcagttgttttccaaaaactttccccacgcgcgcccatctcgaccaaacgctcgcaaggggtaaaacgggaaccatactgcgtggcaagtcgttgcattattgcaaccacttcgcccgcgccgagagaatcgatatagcggaacggtccaccgagaaatggcggaaaaccaatgccaaataccgcgccaatatccccgtcacgcacgctacggataacctgctcatcaacacaacgtactgcttcattcagcatcaacatcacacaccgttcagcaacctgcggtgcggagattcgcccctgcccttgtgtgccaatcagcgggtaaatggcgggatcgacctgttttttgcttttacgccctttctgaccataaagatagaaaccccggccattttttctgcctttgcgatcgtcgttcaaaatactagaaacaacatttgcaggcgcgctaaaacgttctccataagcggcttccagtacaggaataattttagtcccggtgtcgattcctacctcatccaaaagttggattgggcctaccggaaaaccaaatttcactagcgcggcatcaatgtgctctacccgttcaccttgggtcaacatgcggatagcttcattaatgtaaggcgctaagatgcgattgacgtaaaaaccggctttgtcacgcacgacaattggcgttttaccctgttttttcgccagttttactgtggtagcgatggtttgcgcgcttgtccccgcatgaggaataatctccaccagcggcattttttccaccggactgaagaaatgcaggccgataacttgctcaggtcgcgtggcgtgagcggcgatatcaccaatcggtaaagaactcgtattgctagcaaagatggtatgagcggcgcaattttgctcaacttccgccaccatctgttgtttcaattcgagattttcaaacaccgcttcaataatcagatcgcgatgggcaaagccgcgatagtccgtcgttccggagattaatgccagctgtttgtcacgttcgctggctttgagatgacgacggcgaactttgccctccagctgatcccaactgtacttcagcgcatgatttatgccctgcgggttgatatctttaattctgaccggaatccccgctttacaagcagtgacataagcaataccgccgcccatcaagccaccacctaaaatccccacgctgtttaatggcgcaggcggcgcatcactgccgggatctttcttcacgtccgtactggcaaaaaagatactacgcagcgcctggctttgtggcgtcatcgccagttcgccaaacgcccgagcttcggcgtcataaccgctgctggtgccctgcgctaatcccgtttcaacaacctccaggatgcgttctgtcgccggataattgccttgagttttgtgttctgttttcttgccgaccattttgaacagcagcgcacgacctaacggccccgccagaatacgctcgcgtacaggtagagggcgggaagatgggcgctccttctttgccagctcaacagcggcttccagcagaatggagtgcggaacaacgtcatccaccagccccagctttaatgcctgtttcgcccgaagttgttttccggtgaggatcatctctaatgctgtgctgacgcctatcagacgcggtaaacgctgggtgccgccactaccgggtaacaatccaagttgtacttcaggcaaaccgagcaccgttttaggatcgtcagtacaaacgcgaccgtggcacgccagcgccaactccagcccaccacccaggcaagcgccatgaatagccgcgataacctgaatgggcaaagcatgaatctccgccatcaactgttggccctgccgcgccagagcttccgcttcttgcgccgttttgcagttgccgatcatgttgatgtctgcgccagcaatgaagttgtccggtttagcggagacaaacaccacgcctcgcaactctttgttttcacggagttgcttaataatggcgcgcacctggctggcaaactccgccttcagggtattcattttctcacccggtacgtcgatggtgataacggcaatgttgtccagacgaacattaagggtaaacgcacttgtcatttccattattccgcctccagaaccattgccgcgccaagcccaccggcagcacaggcggtaactaaaccaaatccaccgccgcgacggcgaagttcatgcaatgtctgggtaatcatccgcgcgccggtcgccgcgaagggatgcccgtaagcaatgctaccgccaagcacgttaaatttgctatcgtccacttcgccagtggcatgtgcacgccccagtgcttcacgagcaaaacgttcactacccagcaactgaatattcgccagcgtctgagctgcaaaggcttcgtgcatatcgatcaatgtcagatcgctcatcgtcaaaccggcacgctccagcgccagcggtgtactccaggctggaccgagcaacatgtcctgccagacatcaatcgcagtaaatgcgtagctgcgcagataccccagcggcaccagccctaattctttcgcccgggattcagtcatcaggatcaccgctgccgcgccatcggtcagcggcgtactgtttgccgccgttaccgttccgtgtttgcgatcaaacgccgggcgcagctttgcgtaatcggcaaggctggaattaccgcgaatattgttgtcttcgacaagcggttgtttataaggagggataaaggcagtcatcacctcttctttgagttttccgtcactccatgcctgagcggcacgctgatggctacggtgcgctaatgcatcttgctgttctcgggtgatgccgtaggttttcgccatttgctctgcggtgtcgcccatccgcaagccggtagaatattctgctaccgcaggtggtacgggcattaagtcgcgcaaacgcaggcgagagaagagtttcagtcgctggctcatggtacgagctttgttgacatcaaccagcacgcgcgccagttttttactgacgccaattggcaatacgctagaggaatctgccccaccggcaatccccgctcgaatagttcccgccatcaggctttctgcgacgtttgcaactgcctggaaactggtagcgcaagcgcggctgacgctgtaagcatcggtatgtacattcattcccgtaccgagaacaatttcacgcgcaatgttgggggcttcaggcatttgtacgacctgaccaaagaccagttgttcaatcacttcggcggggatctcgctgcgtgccagcagttcgcctaccaccatcttccctaaatcaaccgcgggaatgccatgaaaagccgtcgcctgacgggcaaaaggcgtacgtaaaccgctaacaatggcgatacgatcgccctggcgggtaaccagcggtaaaacctgacccataacactcccctgtaaaaaaataaataaagtggtctgacctgatcatagtcttaaccatttttttacatttagccaagtggagaaaagggaaagtgggagctatgacacagagagaaaagaagaagagaaaagaaaacgcccctgccagcaactgacaggggcgtacgtacccgagaggaattaacgcagacccagctggaaaatcagcatttcagcttcgcaggcaaaagtgaaatcgatatccaggcgcacaccgtcagactcttcagtgaaagtcggggtgattttgcaaggttcagattccacgctacgggctttttcagtcagcgccgccagcgtttgctctgcttctgcgcggtttgcaaacacgcggctgtaagacgcggtgcagtcggagttgtccataatggtgccaacatccatacagcagcaaaccggggtttcatcagcactacatttactcatcgttgatttcctctgtatgtgcacccaaggtgccagataaacgttgtggatattttacgcttccggaaagtgctgctccagttgttaattctgcaaaatcggataagtgaccgaaatcacacttaaaaatgatctaaaacaaaattcacccgaatccatgagtgcgccacctccaaattttgccagctggatcgcgtttcttagatcatatttgaaaaaagatagaaacatacttgcaacattccagctggtccgacctatactctcgccactggtctgatttctaagatgtacctcagaccctacacttcgcgctcctgttacagcacgtaacatagtttgtataaaaataaatcattgaggttatggtcatgagccagaaaaccctgtttacaaagtctgctctcgcagtcgcagtggcacttatctccacccaggcctggagcgcaggctttcagttaaacgaattttcttcctctggcctgggccgggcttatagtggggaaggcgcaattgccgatgatgcaggtaacgtcagccgtaaccccgcattgattactatgtttgaccgcccgacattttctgcgggtgcggtttatattgacccggatgtaaatatcagcggaacgtctccatctggtcgtagcctgaaagccgataacatcgcgcctacggcatgggttccgaacatgcactttgttgcaccgattaacgaccaatttggttggggcgcttctattacctctaactatggtctggctacagagtttaacgatacttatgcaggcggctctgtcgggggtacaaccgaccttgaaaccatgaacctgaacttaagcggtgcgtatcgcttaaataatgcatggagctttggtcttggtttcaacgccgtctacgctcgcgcgaaaattgaacgtttcgcaggcgatctggggcagttggttgctggccaaattatgcaatctcctgctggccaaactcagcaagggcaagcattggcagctaccgccaacggtattgacagtaataccaaaatcgctcatctgaacggtaaccagtggggctttggctggaacgccggaatcctgtatgaactggataaaaataaccgctatgcactgacctaccgttctgaagtgaaaattgacttcaaaggtaactacagcagcgatcttaatcgtgcgtttaataactacggtttgccaattcctaccgcgacaggtggcgcaacgcaaagcggttatctgacgctgaacctgcctgaaatgtgggaagtgagtggttataaccgtgttgatccacagtgggcgattcactatagcctggcttacaccagctggagtcagttccagcagctgaaagcgaccagtaccagtggcgacacgctgttccagaaacatgaaggctttaaagatgcttaccgcatcgcgttgggtaccacttattactacgatgataactggaccttccgtaccggtatcgcctttgatgacagcccagttcctgcacagaatcgttctatctccattccggaccaggaccgtttctggctgagtgcaggtacgacttacgcatttaataaagatgctagtgtcgacgttggtgtttcttatatgcacggtcagagcgtgaaaattaacgaaggcccataccagttcgagtctgaaggtaaagcctggctgttcggtactaactttaactacgcgttctgataacgcgttcgcctggataaagtcacctgcatagcaggtgactttaactcccccacttcaccgaaagtagtgtcctcattgcttacctcctgagttttgcaaacagcctgttggcagcttgccctttcaaatcaataagcggtatccacagacaaacctgaagggaaaggcatattttcaggcgttctgctcgtccttctcaaagagtttacttttctgcatttccaggatactccccccccctggctattgtgcgctcatacactcaaattaaagataggttctaaataaatgagcgttttttgatagtctatttcattaggtaatatatatttgtaacaaatcaatcaaaatggaataaaatcatgctaccatctattagtatcaacaataccagcgcagcttacccagaatccatcaatgaaaataacaatgatgaagttaatggattagtacaagagttcaaaaacctttttaatggtaaggaaggaataagcacctgtattaaacatctacttgagcttataaaaaacgccatacgagtaaacgacgatccttatagatttaatattaataattccagtgttacttatattgatattgactccaatgatacagaccatattactattggtatcgacaaccaagaaccaatagaattacctgcgaactataaagacaaagaactcgtccgtactatcattaatgacaacatagttgagaagactcatgatatcaataacaaggaaatgatcttcagcgcattaaaagaaatatatgatggagatcctggttttatcttcgataagataagtcacaaactcagacatacggtaacggaatttgatgagagcgggaaaagcgaaccaacggacttatttacctggtacggtaaagataaaaaaggcgactctctcgctattgtaattaaaaataaaaacggaaatgattacttatctctcggttactacgatcaggacgactaccacattcaaagaggaattcgtattaatggtgatagtctcacccaatattgtagtgaaaacgccaggagtgctagtgcgtggtttgaaagcagtaaagctatcatggcagaaagttttgcaactggttccgatcatcaggttgtaaacgagctcaacggggaaagactgagagaaccaaacgacgtttttaaacgttatggtcgagcaataagatatgattttcaagtggacgatgcaaaatataaatgcgaccatctaaaagaaatagtttctactttagtcggtaacaaaattaacgttggccattctcaaaaaatatataagcattttaaggatctcgaaggtaaaattgaagaaaggcttcaaaatcgccaggctgaatatcaaaatgaaattaatcaaccatctgcgccaggtgttaattttgatgatatttaaaattatttttccagttttttgatttttcaacagctgaatatcggaaatagtcagtgacgaacatcagtatttttacataattacgtctaggtcattgtcggtttatctccttttacttgtggtaattgagggataacaacaaaaaaggtgagttttgcgactcaccttttttatttgtttcttattcagaatcaatatcttttaaatcatcctgaatcgcttgtgcgttcggattttcctgcggtttgagttcgccgccattagcgatgaaatcatgacgctggaagtacgcttcgcgcaccataatataaggatcggagctctgacgcagcagaccatcggaatccagcagctgagcgcgggtttcgatcccttcaagcgtccatttacccacagacatcggccaggtcagccaggaaagaaccgggtaaaaaccatccgccatatcaccaccgtcatcacgcagcgtgaagctaccgtagaacggtaactgaacgtaaggcccataacccacgccataatgaccaagcgtactaccgaagcggtgaggttcagtccgttgcagtttcgggttcgccatccctgcaacatcaataaaaccgcccatccccaaaatggtgttcaggaaaaagcgggtaaagtggaccatcccctgataagggtcgccctgcaagaagtagttaaccatcaccgcaggttcttcaaggttgccagtaaagttgctcaaaccgttacgcgccggttgcggaacataatcacgccaggcgacagcgaccggtcgaacaatatacgggtctaatacattgaagttgaagttgtacatggtgcggttgaacccttctaacgggtcagaacgcccttgctgatctgtaccggaactcgcacaccccaccagaagcgtagttcccagagcaagcgcgctcaggcgaagcttcataaatgtctccctgtttttttatggcttatgcagtttgccatccatgacggaacgataccgtatccgcctgtttaggtgtgggcgattgtaacagcacgtcaactgatgtccagacgccctgatttgctgatttgatcatagcctggtaatcgccgccctgtaggctacttgattctatagaaacagaaaaaggcaaacgcagccttttctacattttcagagtaactcccgtcagttgcgagcaaaaaagccgctacgctttagctatacgtgctaattcaagagaagagaccatggacaacgacaaaattgatcaacacagcgacgaaattgaagttgagagcgaagaaaaagagcgcggcaaaaaaatagaaatagatgaagaccgactcccctcccgggcgatggcaattcatgagcatatccgccaggatggtgaaaaagagctggaacgcgacgcaatggcgctactgtggagtgccattgcggcgggtctgagcatgggcgctagcttactggcaaaagggatatttcaagtcgaactggaaggtgtgccgggcagcttcttgctggagaatctcggttatacctttggttttattatcgtcattatggcccgccagcaattatttaccgaaaataccgtgactgcggtactacccgtcatgcaaaaaccgacaatgagcaacgtcggcttacttatacggttatggggcgtcgtgctgctgggtaatattctcgggacaggtattgcggcgtgggcatttgaatatatgcctatcttcaatgaagaaactcgcgatgcatttgtcaaaatcggcatggatgtgatgaagaacacccccagcgagatgtttgccaacgcgatcatttccggctggctgatcgccactatggtttggatgtttcctgcagcgggtgcggcaaagattgtggtgattatattgatgacctggcttattgccctgggtgacaccacccatatcgtggtcggttctgttgaaatcctctatctggtgtttaacggtacgctgcactggagcgatttcatctggcccttcgcactacctactttagcggggaacatctgcggcggcacctttatcttcgcgttaatgagtcatgcacagattcgtaacgacatgagcaataagcgtaaagcagaagcacgccaaaaagcagaacgtgcggaaaacattaagaaaaattataaaaacccggcataaatggcgagggtttaagcaatcgagcggcagcgtacttaccccgcactccattagcgggtatactcatgccgcattgtcctcttagttaaatggatataacgagcccctcctaagggctaattgcaggttcgattcctgcaggggacaccatttatcagttcgctcccatccgtaccagtccgcaaaatcccctgaatatcaagcattccgtagatttacagttcgtcatggttcgcttcagatcgttgacagccgcactccatgacgggtaaaaagtggataaaataattttacccaccggatttttaccctagagccatacagcctcacactcgatgaggcctgtcagtttcttaaaatatcctgatctaccatcgccgtcatagagcgtatttttattacctgatttgcaggttcgattccctattcggagatagcactcatgcaacacgaactacagcctgatagtctggttgatttgaaattcatcatggctgatactggctttggtaaaaccttcatctatgaccggattaagagtggcgacctgccaaaagccaaagttatccacgggcgagcaagatggttatatcgtgaccattgtgaattcaaaaataagctcttaagccgcgccaatgggtaaaatagcgggtaaaatatttctcacatctaaaaaacaccattccaatcaatcccctgctgcttcaagtagatgtctgcaggggacaccatccttgtgtttatccctaaaaccacataaaaaccgtaaattaaattcgaactagcaggccgaataaggcacaccaggaactcgtggttttattcattaactagtggtttttacctgttctcttagccagataataaacgcttcaatttttggccactgcctgcccggtaatgtggtgatgtaataatgctgatggcatttcaccgtcatatcgccaaacggcgcgacgagctcaccactggcaagccttttttgtaccaggcgttttcttcccatcgccaccccaatatgattcatcgcggcaataacagctaaatcagaacgatcaaagccaattccagaagatgtcggcaaattaaccgcataatgttgcgcccaactatgccattcatccgtaccggagtcgttgctccatgcctgtctgtcatggagcaacgtacagtgacacaggttaattaccgtgttggttaaagcatgtctttgagcgtattccgggctacatactggcaggatttcttcatccatcagaaagtgatgagtgagttgcgcactcggcgcatcatcaaagtagatcgccaaatcgattccggcacgttgcagattgacgttgtcattaccagtgagcacggtgaggctaatagacggataccggcgtgtaaagtcacctaatgcgggcaccaaccagcattgggcgatagagggccgggaatacagagttaacgttccgcttaactcctgatttttgatatcaagaatttcctggttcagggtatccaggctgctttttagcgcccaataaacacgtttcccctcgtgcgttaattccactttgcgatgggaacgaacaaacaactgaatgcccaattcttcttccagctgattgatacggtgacttaccgcactggggctcaggctcaattcctctgccgccagggcgaaggactgatgcctggcagccacttcaaaagtatgcattttacttaattgccagccgttaagcagccgatttcttatttcacgaaggggttccataatcacctcatttttcgcttaagtgtaaaaaaatagcggcaaaatttcagctatgagatgagctaaagtgaaccatatctcaattcaccttcatttttagatgtaaatcactccattgatgcaatttacctcatgtgaaaggcaaattttatcgtttgtcagcctgcgttgtttttttgtccaatatcatcaggttaatcacaggggaaggtgagatatgcactctcaaatctgggttgtgagcacgctgcttatcagcatcgtgttaattgtactgaccatcgtgaagttcaaattccacccgtttctggcgctgttgctggccagcttcttcgtgggaacgatgatgggcatggggccactggatatggtaaatgctattgaaagtggaattggcggaacgctggggttcctcgcagcggttatcggccttggcacgatactgggaaaaatgatggaagtatccggggccgcagaaagaattggtctgacacttcaacgctgccgctggcttagtgttgatgtcattatggtgctggttggcctgatttgtggcatcacgctgtttgttgaagtgggcgtcgtgctattgattcctctggcttttagtattgccaaaaaaaccaataccagtttattaaagcttgccattccgctatgtaccgcattgatggcagtgcactgcgtggttcctccacatccggctgctttatatgttgccaataagctgggcgcagatatcggtagcgtgatcgtctacggtttgctggttgggctgatggcaagtctgatcggtggcccacttttccttaaatttctgggtcaacgactgccctttaaacctgtacccacagagtttgcagatctcaaagttcgcgatgaaaaaacactaccgagtttaggcgcaacgttattcaccatactgctacccattgcgctgatgttggttaaaacgattgccgaattgaatatggcgcgtgagagtggtttgtatatcttggttgagtttattggcaaccctatcactgccatgtttatcgccgtgtttgtcgcctattatgtgttgggtatacgccagcatatgagcatggggacgatgctcacacatacggaaaatggcttcggttctattgctaatattttgctgattatcggggccggaggcgcattcaacgccattttaaaaagcagcagtctcgctgatacgctggcagttattctctccaatatgcatatgcacccgattcttctggcctggttagtggctcttattctgcatgcggcagtgggctccgctaccgtggcaatgatgggggcaacggcaattgttgcacccatgctgccgctgtatcccgacatcagcccggaaattattgcgattgctatcggtagtggtgcaattggctgcactatcgttacggacagccttttctggctagtgaagcaatattgcggcgctacgctcaatgaaacatttaaatactatacgacagcgacatttatcgctagtgtcgtcgctctggcgggcacattcctgctgagttttatcatctaagcgcaaagagacgtactatggaaaacgctaaaatgaacagcctcatcgcccagtatccgttggtaaaggatctggttgctcttaaagaaaccacctggtttaatcctggcacgaccagtttggctgaaggtttaccttatgttggcctgaccgaacaggatgttcaggacgcccatgcgcgcttatcccgttttgcaccctatctggcaaaagcatttcctgaaactgctgccactggggggattattgaaagtgaactggttgccattccagctatgcaaaaacggctggaaaaagaatatcagcaaccgatcagcgggcaactgttactgaaaaaagatagccatttgcccatttccggctccataaaagcacgcggcgggatttatgaagtcctggcacacgcagaaaaactggctctggaagcggggttgctgacgcttgatgatgactacagcaaactgctttctccggagtttaaacagttctttagccaatacagcattgctgtgggcagtaccggaaatctggggttaagtatcggcattatgagcgcccgcattggctttaaggtgacagttcatatgtctgctgatgcccgggcatggaaaaaagcgaaactgcgcagccatggcgttacggtcgtggaatatgagcaagattatggtgttgccgtcgaggaaggacgtaaagcagcgcagtctgacccgaactgtttctttattgatgacgaaaattcccgcacgttgttccttgggtattccgtcgctggccagcgtcttaaagcgcaatttgcccagcaaggccgtatcgtcgatgctgataaccctctgtttgtctatctgccgtgtggtgttggcggtggtcctggtggcgtcgcattcgggcttaaactggcgtttggcgatcatgttcactgcttttttgccgaaccaacgcactccccttgtatgttgttaggcgtccatacaggattacacgatcagatttctgttcaggatattggtatcgacaaccttaccgcagcggatggccttgcagttggtcgcgcaagtggctttgtcgggcgggcaatggagcgtctgctggatggcttctatacccttagcgatcaaaccatgtatgacatgcttggctggctggcgcaggaagaaggtattcgtcttgaacctagcgcactggcgggtatggccggacctcagcgcgtgtgtgcaagtgtaagttaccaacagatgcacggtttcagcgcagaacaactgcgtaataccactcatctggtgtgggcgacgggaggtggaatggtgccggaagaagagatgaatcaatatctggcaaaaggccgttaataacgtttcaacgcagcatcgcaatcctttccctgggtgagcgatgctgccgatggcgcagacttaagatccccggtcttacccgctataaccccctccttttatcatcacccaacgcctttcgctgtaaacggcggtttcgcaaaccaaaccaaaaccgtaagtaagataaaagcaatagccgccatacggaaaatctcatttgcagaaatagaaagactctgctgggttatttcattattaatttcattaagaactccactaaggctaccataatatttatccataatttgactgctactattaaacacggggttaaattgatcgatggttgctgtcaactgactatggtgtaagctttcgcgtcgtccccacagcgtcattgtcaagctcgtaccaacacttccactcaaggtacgaaaaaaattactcatactgctggcattggcaaatttattatctggcaagccactaaagctaatcgttgttaagggtaaaaagaaacaggcaacggcgaatccctgaaaaaactgcggcaaaatgatgcctgtaaaatcaatcgttggcataaatgtcacagaacgccagtaatagcaaaccgcatacatcaaaaaactaaatgtcactaacaaccgcatgtctattttgttgccataacgtcctatcaaaggactaattaatagtggcatgatgccgatgggcgcataagcaagtccggcccatatcgcattataccccatcgtttcctggagtaactgcggcataaggacgatcgctccagagtaaaataaatacgcgcatgtgatactcacaataccaatggtgaagttacgggacttaaacaaactgagatcaagaatcgggttctcactggtgctctcccaaatgactaaagagatcagagaaataacacttactactgttaatattattattgtactgctgttgaaccaatccagatcgcgccctttatcaagcataatttgcaagccaccaacaccgagcactaacagggtcagtcctggtagattcattttgaccggactagtctcagtttctcttcctttaagtaaggttaagcataatgtcaggacgataatccccatagggacattgattaaaaatatccaaccccagctaaagttatcacaaatataaccgcccaatatcggcccacatatcggagcgataatcacggtcatactccataatgccagagcaaatgttcttttttctggcggataattccttaataataaactctgactcagtggaattaacggccccgccattaacccctgaacgactctaaaaaatatcagcacatcaagattggtgcttaggctacacattaaactagacaggctaaaaaaagtgacactaagtaaaaataatcttaattcgcctattctttgtgccaacctgccagtaacagggatcgcaatggcatttgctacaccaaagctggtgataacccaggtgccttcgtctgtacttgctcccagaaagccagatattgtcggtattgcgacgttagaaatagtggaatccaacatttgcataaatgtcgctaaactcaatgcaatagtgacgcaccataacgtcccaccggttaatggtgccggagtacttttagtgattgccattaaagttgtccattatggctaataatgttgctaatttctttttctatcggactggtatcgataactaaagccttactggtataagccggcatggaggtcacggtactagccagctcaggcatctcggcaatgtcttcgttcttcgtatcaatagttgctgtcatgcttaaaccaatacgcaaggggtgttccatgagttcttttggatcaagagaaacttcaaccggtacacgctgaacgattttgatccagttccctgtcgcattttgtgcaggtaataaggagaacgcattgccggttcccatattgatccctgtcacccgaccatgaaacacaacattttcaccataaagatcgctgataatattgacgctttgaccaatccgtacatccgtgagttgtgtttctttaaagttggcattaacccacatttgacgtgccggtacgacagccattaagctttgtccggggctcactgtttcgccgacctgaacacttctctgggcaatatagccggtaaccggactcttaatatccgtacgtttaagcgccaaccaggcttctttagttgcatccgccgcttcaacgacttgtggctgacggtttaatggtgtgttcattactaaagctttattcgctttataagcctggatagcggcattcaatgccgctttgctacttattaacgtatctttggtatgctccagcgtttctttactaataaccccctgcttcgctaacggcactcgacggttataatcttctaaagattgttgatactgaatacgtgcactagcgacttcggcactgtattgtttatcctgtaagtatagtttattcgtttgccgaacaatatttgccagattatttttagctttattgagtgcgatagtggcatcagttttatccagactaactaaaatgtcaccttgtcgaacgtagttcgtatctttatgattaacgacagtgacactaccactgacttgtgcagaaattggatctgcattccccgtgacataggcgtcatctgtactaatcatgtcttctaattccatactccaataggcataggcaccactaaacgcaataaataaaactaccgccaataaagaaaagtattttcttctgttagaatgttttttattactattaatctgttccactattatctctcatttctcatagatgaaatttatgaattgaatgaaaagagcattcattcttcatatcaaacacagtgcatgtgttgcacattatcccaggaacgttggaggcctaatttaaatgaggtgcaaaaaaaacaacagaggactaaaccgtggcttttgcaatacaattcttacgcctgtaggattagtaagaagacttatagtgccaacttgaaactataaatcatcggtacaatccctgattttattgttgacatttcatttatgccgactatttatatggtatacttgtcgaattatcttaaaggaagctcagattttcttatttttattgagaaaatgagatgacgccttatgtctgtattactacagggagaagggagatgcttcattgcaaagggaataatctatgaacgcaataattattgatgaccatcctcttgctatcgcagcaattcgtaatttattgatcaaaaacgatattgaaatcttagcagagttgactgaaggcggaagtgccgttcagcgggtggaaacacttaagcctgatatcgtcatcattgatgtcgatatccccggagttaacggtatccaggtgttagaaacgctgaggaagcgccaatatagcggaattattattatcgtctccgctaaaaatgaccatttttacgggaaacattgtgctgatgctggcgctaatggtttcgtgagtaaaaaagaaggcatgaacaatatcattgcggctattgaagctgcaaaaaatggctactgctatttccccttctctctcaaccggtttgttggaagtttaacgtccgaccagcaaaaactcgactccttaagcaaacaagaaattagtgtcatgcggtatattcttgatggcaaggataataatgacattgctgaaaaaatgttcatcagcaacaaaactgtcagcacttataaaagtcgcctgatggaaaaattagaatgtaaaagtctgatggatctttacacattcgcacaacgtaacaaaatcggctaaccacatgaagtttttaccctatatttttcttctctgttgtggtctttggagcaccataagtttcgcagacgaagattacatcgaatatcgtggcatcagtagtaacaaccgtgtcacacttgatccactacgtctgagcaacaaggaattacgttggttagcgagcaaaaaaaatcttgtgattgcagtacataagtcccaaacggctacgttgttgcataccgatagccagcaacgggttcgtggtattaatgctgattatttaaatcttttaaaaagagcgttaaatatcaaattaacactccgggaatacgcagatcatcaaaaagcaatggacgcgcttgcagaaggtgaagtcgatatagtgttaagtcatttagttactagcccgcctcttaataatgacattgctgcaaccaaaccattgataattacctttccggcgctggtaaccacccttcacgacagtatgcgaccgcttaccagtccaaaaccagtaaatattgctcgggtagcaaattaccccccagacgaggtaattcatcaaagttttccaaaagcaacaattatctcttttacaaatttatatcaggcattagcatccgtcagtgctgggcacaatgattactttattggtagtaacatcattaccagcagtatgatttcccgctatttcactcactccttaaatgtagtgaaatattataacagcccgcgtcaatataattttttcttgaccagaaaagaatctgtcattcttaatgaagtactcaatagatttgttgatgctttaacaaatgaagttcgctatgaagtaagtcaaaattggcttgatacaggaaacctggcctttctgaacaaaccattagaactcactgaacatgaaaaacagtggattaagcagcatcccaatttaaaggtgctggaaaatccttacagccccccctattctatgacggatgaaaatggcagcgttcggggcgttatgggggacattcttaatattattaccttgcaaacaggtttaaatttttctccgatcaccgttagtcacaatatccatgctggaacacagcttagccccggaggatgggatataatacctggcgctatttatagtgaagatcgagaaaataatgttttatttgctgaagccttcataacaacgccttacgtttttgtcatgcaaaaagcgcctgacagtgaacaaacattaaaaaaaggaatgaaagttgccattccatattattatgagctgcatagccaattaaaagagatgtatccggaggttgaatggatacaggtcgataatgccagcgctgcatttcacaaggttaaggaaggtgaacttgatgctctggtcgcgacacagctaaatagccgttacatgatcgatcattactatcctaatgaactttatcattttcttattcctggcgttccgaatgcaagccttagcttcgcttttcctcgcggagaaccggaacttaaggatattattaataaagcactgaatgcaattcccccaagcgaagttctgcgcctgacggaaaaatggattaaaatgcccaatgtgaccattgacacatgggacctatatagcgagcaattttatattgttacgacattatccgttttattagttggcagtagccttttatggggattctacctgttacgcagtgttcgtcgtcgtaaagtcattcagggtgatttagaaaaccaaataagtttccgaaaagcactcagcgattccttaccgaatccaacttatgttgtaaactggcaaggtaatgtcattagtcataatagtgcttttgaacattatttcactgcggattactacaaaaatgcaatgttaccattagaaaacagtgacagtccctttaaagatgttttttctaatgcgcatgaagtcacagcagaaacgaaagaaaatcgaacaatatacacacaggtatttgaaattgataatggcatcgagaaaagatgcattaatcactggcatacattatgcaatcttcctgcaagtgacaatgcagtatatatttgtggttggcaagatattactgaaacgcgtgatctaattaatgcactcgaggtagaaaaaaataaagcgataaaggctaccgtagcaaaaagtcagtttctggcaacgatgagtcacgaaataagaacaccaataagctctattatgggcttcctggaacttctgagcggttctggtcttagcaaggagcaacgggtggaggcgattagtcttgcctacgccaccggacaaagtctcctcggcttaattggtgaaatccttgatgtcgacaaaattgaaagcggtaactatcaacttcaaccacaatgggtcgatatccctactttagtccagaacacttgtcactctttcggtgcgattgctgcaagcaaaagcatcgcattaagttgcagcagtacgtttcctgaacattacctggttaagatcgaccctcaggcgtttaagcaggtcttaagtaatttactgagtaatgctctcaaatttaccaccgagggggcagtaaaaattacgacctccctgggtcacattgatgacaaccacgctgttatcaaaatgacgattatggattctggaagtggattaagccaggaagaacaacaacaactgtttaaacgctacagccaaacaagtgcaggtcgtcagcaaacaggttctggtttaggcttaatgatctgcaaagaattaattaaaaatatgcagggcgatttgagtttagaaagtcatccaggcataggaacaacatttacgatcacaatcccggtagaaattagccagcaagtggcgactgtcgaggcaaaagcagaacaacccatcacactacctgaaaagttgagcatattaatcgcggatgatcatccgaccaacaggctattactcaaacgccagctaaatctattaggatatgatgttgatgaagccactgatggtgtgcaagcgctacacaaagtcagtatgcaacattatgatctgcttattactgacgttaatatgccgaatatggatggttttgagttgactcgcaaactccgtgagcaaaattcttccttacccatctgggggcttacagccaacgcacaggctaacgaacgtgaaaaagggttaagttgcggcatgaacttatgtttgttcaaaccgttgaccctggatgtactgaaaacacatttaagtcagttacaccaagttgcgcatattgcacctcagtatcgccaccttgatatcgaagccctgaaaaataatacggcgaacgatctacaactgatgcaggagattctcatgactttccagcatgaaacgcataaagatctacccgctgcgtttcaagcactagaagctggcgataacagaactttccatcagtgtattcatcgcatccacggtgcggctaacatcctgaatttgcaaaagttgattaatattagccatcagttagaaataacacctgttagtgatgacagtaagcctgaaattcttcagttgctgaactctgtaaaagaacacattgcagagctggaccaggagattgctgttttctgtcagaaaaatgactaaatagcggctcccacaatgttcaaatgtgggagctatttaccagcacatcttacatttaactactgaactcctggcgaatttgttccccatgctggtcgagcgttgccgctcccggcataacatgcgggtccgcgcagccgctgatttttatcggattacccggcatcattattcccccggcttcaatcaacatatttctcgcctgagtttgtggcaatttaatggcctcagccacacttaataacggcgcgacgggtacaccaacttcatgtattctggctaaccaaacttcagctgcctgcgtttttaacgtccgctcaatatattgtttaagaatagcctggttttgtacgcgtaaaatattgctgctaaatcggggatcattaaccagttccgtaagctccagtgcctggcataacgcagaaaaaagcttgtcattaccacaacaaatcgtaatcggcttatcctgagtattgaaaacatcaaaaggtgccatgtagggatggcgatttcccagacgttgtggactcttcccagttgcgatatatgccatcagaccatgctccagaaaactcagcgtggcatcaaacatcgctatatcgacatgcgcccctctctggctcttttcgcggccataaagtgcactcactattccgctgaataaatagacaccgccgcatagatccgcaagagatgtaccaacgcgcactggcggagcatcaggatatcctgtttccatcattatcccgctcattgcctgaatgatggtatcgtaggcaggagcatcttttagcggaccggtatgtccgaaaccactgctactagcatatatgaggcgcgggttgatttcttgaagcgtttcccaactaaaccccagtttttccattgtacctgggcgaaaattctcagctaatacatcagcttgtttgagcatatttataaatatacttttatcgtgatcattctttaaatcaagaaccacactctctttgccatgattaataaaactgtaatagagactctgtccatccacatagggaccaaatgtgcgggtatcatcaccatgacccggcggctcaactttaattacccttgcgcccatattacaaagaagttgagttccgaaaggtccattaaggacatgtgtcatatcgataactaataagccttcaaacggccctttgctttcattatttgtcatttgcttatgccttgaaaaaagccgaaggtgaaaagacacttcggcatttatgtaaaatcaataacatgattaattaactaaccagtcgactgacataaatccacaagggagccgtgacgacaaagcccagtacgctcacagccaaactcgctgtaccagtacgggtgtagacattaaaccggctggcaataatgattccggagaatgccggcggtaatgcgcctgccagtaccatcatctgcagatgttcgctgttcaaatgacatgccataccaacgagaagcagtgccagtggcatcagaatcagcttcaggaaggtgttataagcaatttcggcactgaactcgaatttatgtgcagccagagtcaaccccgcagcgaataccgctaccccactgttagccttcgcaatcagattaaaggttgggtcccatgctgccggaatttttaccccaaccaacaccaggatcgttgccagaacaggtgcccatactactggctcctttgccgcagaaattaatgcgctcagattactattcttcttaccatccgctccactagaaggattcagcaaatacagaccaataggaatagtaattgcgttaacaataatagaaataattgctaccactaaacctgtacttacggaatcaccataaataggatcgagaactgcaaaccccaggaatccaatggtaggactacctgcaattaatgcacatacagctgcttctgcatgggtacgtttaaaaaatttgtagcaaccgaaccaggagaaaaagaaacatccgacaataaccacaagacttacaagggtcagacgagtgtccgcaaaaatcatttccctgtttgcccgagtaatagatacaaatagagccgcaggaagcgcgtagtttaataccagtttattaaatgcccgagcttgatcttcactaaatgtttctcgtctgccgctaaaataacccaacagcatgattacgataataggcaataaatcgccaataaaaaatgttagcataatagtatttccgataagggtcccctcaccatcgcataatgagttggcaagaggagacgatgtcagtatttaattaccagcgacttgttttgggttaagtttggtaatatggccactttcagttcctgctgcagggtcgatgaccacattaataatggtcggtttgcggctctgaataccggtggttaaagcatgacgaagttcatctgtcgtggtgacgttatagccaacgccacgaaacgcatccattaatttgtcataccttgcatggtgcaacagatccgttggacttggtgcaccagcgccactgagatcaacaccgtctcctctgtagatgccgccattattaaaaataacgatcgtcaccggcaggttatatcgacaaatcgtttcaatttccatcccactgaaaccaaaagcactatcaccttcaatggcgacaaccggagaaccagaagtcacgctagcaccgatggcatagcccataccgatgcccatgacaccccaggtaccacaatccagacgacgacgtggtttatacatatcaataatatttcgtgcattatccagggtatttgcaccttcattaactaaataaatatcctggttctcgcgcaatacgtcgcgcacagcacttaatgcattaaagtaatttaatggttgagtatctgtacttaatttttcatgcattttttgtgcattttgctgcttgtggatatttaaaatatcgcgccataccagtggagtcgtaaatgtgttttgtttcagttctgccagcataccttgcatactggatgcaatatcaccaacgactggcacagcaatggggcggttgctgtcaatttcctgcggttcaatatccagttgaataaactgtgtatctgccgcccatccttttttaccgtgtgccaataaccaattcagtcgtgcaccaacaagcatgacaacgtcagcatttgccagggcaaagctacgcgcagctgccgcagaaagtggatgcgtatcttcaaggatccctttcgccatagacattggcaggaatggaatctgagcactttcaataaattcacgaagctgttcatcagcttgactatacgccgcgcctttgccaaggataattaatggccgttcagcttttgctaaaaggctaattgcgctagtgacactcttcgggcatggcaataatgctgggctcggattttcaactttaacaatcgtggttaacgcttcgtctttttccatcgtcgcggccaggacatttgctggcaaatcaagataaactccgccagggcgaccgcttacagagacccggatagcgcgtgccaatgcaatgccaagatcctgcggctgattaacgcgaaatgctgctttggcatacggttttgccgcattcatttggtccagctcttcataatcaccttgctgtaggtcgacgatcgcgcggtcgctggagccgctaatcatgatcatcggaaaaccatttaccgttgcgttggccaatgcggtcaaaccattgaggaatcctggcgcagaaactgtcaggcagatccccggtttttgggtaagaaaaccgcttgccgcagcggcatagcctgcgctctgctcatgacgaaaaccaatataacgaatgccttccgcctgggcatggcgtgccatatccgtcacaggaatacctacaacaccataaatagtgtcaatattattctgttttaatgcttcaacgatgatatgcataccatctgtcatttgaagttgatcactcatgattaataacctcgaaatttttataaattgggagccagaagcccccgttaatatcagatggcgtggttttgcttcattgcagcaatttcatcgtcgctataacccagctcctgcaatacagcagcggtatgttcacctaatagcggcgcagctttaatatccggcgtaaaggcagagaatttcattggacaaccaacggtcagatattttccacgcaacggttgttccacttcaacaacactgccactttggcgcaaagagggatcaagactaatttctttcatacttaaaaccggtgcacaaggaatatcaaactgagtcaaataggccaccgcttcatgtttatcaatagtgacagtgtatttttcgatttcagcaaaaatatcgaaaatatgtggctgtcgtgcatgggctgtactgtatgccggatcggtaatccattctggtttgccgatggctttacaggtgttttcccagttttgctcctgaatagtgaaataaatataggcgttaggatcggtttcccagcctttacatttcaggatccagccaggctgaccgccaccacctgcattaccaccgcggggaactgcatcaccaaatgtaccattcggatactgcgggtattcttccagataacccaatttatcgagacgctgctggtcacgtaatttcacgcggcaaaggttcaatacggcatcctgcatactcatggtgactcgttgcccacgccccgttttttcgcgatgcagcaaagcagcaagtaaaccgatcagcaaatgcattccggtgttgctgtcacccaacgctgcagcgcttaccagcggcggaccatcccaaaaacccgtagtggatgccgcgccacccgctgcctgagcaacgttttcataggcttttacattcacataagggctacactcatcaaaccctttgatgctaccaaaaatcagacgtggattgatttcttgaatatgctcccaggtgaagcccatgtgatcaatggcccctggatgaaagttctcgactaagatatcagcttcgcggatcagcttttccattacctctttgccttccgctgttttggtatttaactcaatagaacgtttgttactgttaagcatggtgaagtaaagcgcatcgatatcaggaatatctcgcagctggtgacgcgttacgtcaccaacgccgggacgttcaattttaataacgtcagcgccaaaccaggccagcatttgagtacaagatgggccagattgcacaccggtgaaatcgagaactttaattccttgaagtggagtactcatagcaatacctattagttaattaaatatgtgttaatttagcgtttatttaaggcgtaatatcttctataaataacccgcaaaatatcgtcgtagctgcactcgatatttttaaaatcctgtatcaagtgctgaaaatcatttcatcgccacttccaattcctttctgcatggtaagtagtgaggacgaaaagaagaatatgataaatattgattcgtggtaatcagagagagtcgcgacatttgtgatgttattcttacaactgtaagaagcgccggtgatttacaagcaagggtatgattacgctttttaaagcgtaccataaaacataacataataaatgatttgtgatgacacgggattattgcggtttactttgaggaatataaaatgcgagtttatagcaccgcgagcgccaaataattttatgaccacaacctgtcgtattgtggtcataaaaaattgtcggctggagggagttaaatcctttacctcaatatactgcctgtcagcattagttcacaaacagtgcttcgctatcgacgatgattccatcttccgcacctttaagcgccaggtttgcctcgtagtattgctttttatcaagcagtttctgcgcatcagcaagtgcattacgagtctgtttaagtggcatcagatattggttttccattacgccaacaccggccaggcgaagctcttccattgcgccctttttatcccctttcgccattttttcattggcaatttttatcgcggcttctttttcgggagttgctacataactctcagaaattccgacagatgcattaatgacaatatattggtcatcattgagattggtctttttacctggcttagcgaactttgcccattcggtactgtcatcactcagcaaagcggaagcttcattggtcagttcttttgccttttctggatcgccatgaaacagagccaggcgcgctacctgcacgtcacgcatcgcatataaaccttgttcagagatacgctctgctgccgctgccgttttctgggtttgctgaacttgctgagtttgctgttgtgccgctaccggagcattatcagcagcccatacagtactagatgccagaattgctgtgaccatcgtggccataattaaacgtttcatacttacctcattctttaacagttttagaaaacgccgccatcatattgggtgagcatgaaatgagaaatcagagagcaacggtcattttgaaagggttatcttacagttgtagttattatcgcaagaagtattttagtcttacaattgtaggaatatgcttcctgtcgcagagaactattcttatataccacaaagagatgtcatttattatatcgatgtaaatactgattaattaaatgtaaatacagccataacatcgtaggttctcagtgaaccattttcaggataactttctatgaaagtaaacttaatacttttcagcttatttttattggtctctattatggcatgcaatgtttttgcattttccattagcggtggtggaagtgagaggagctataaagagactgaaaaaacaagtgcgatgacgaccacacactctacaaaacttcagccaagtcaggcgattttgtttaagatgagagaagatgcgccaccattaaacctcacagaagaaatgccgcccccttttccgacaaaggcgaattatcttattcatcctgtgcgataacgtctttcacatggcaggtgaacaatcatgtctgatgctgatgtgaacacctgcccaaatgagccatcctgacccattaccgcctgccataccccaccataaagcgaatcatcaagccacaagccggggcaagaaacataaatatccccgtcactagttcattaccgccagttaaccacatggtgaagtaataaatgagtgcagcgaggatcaccatgccgaagaaagaagagaccgcgcttaccacgttcagtacctgaccgatgtagccgcttacgcagacaatacacagggcgagaaacatccataaattaatcatagctcaacctcctgccgcgctaaaaaacctgtaacttcagtcactttaatagtaagacaatccttaacctctggcaatttttgctaagcatcaatgaaaacagcatgttaaatgcaagactgttgtgtacggaaaaatatttactttgcacgattaataatcagtagctgaaagcagtcagcgagtgataaagtacagataccgcattcatgctcctcgtggttatgtcctgactagtctttacactctttacaggaaccattgtcgtacatgatggcccaaccaattgagtgtaccgctgtcgacatggaatcttctgcgatacaacaattcgtatctacagaaggtaactatgtttccacaatgcaaattttcccgcgagtttctacatcctcgctactggctcacatggtttgggcttggtgtactctggctttgggtacagcttccttatcctgttctctgctttctcggcacgcgtattggcgcaatggcgcgaccattcctgaaacgtcgtgaatctatcgcccgtaaaaacctggaactttgtttcccgcagcattctgcggaagaacgcgagaagatgattgccgaaaactttcgtagtctcggcatggcgctggtagaaaccggcatggcatggttctggcccgacagtcgcgtacgtaaatggtttgatgttgaagggttggataaccttaaacgcgcacaaatgcaaaatcgcggcgtaatggttgtcggcgtccattttatgagcctggaactgggcggccgcgtgatgggactgtgccaaccaatgatggctacctatcgtccacataataatcagctgatggaatgggtgcagacccgtgggcgcatgcgctctaacaaagcgatgatcggcagaaataatctgcgcggcattgtcggtgcactgaagaaaggtgaagcggtatggtttgctcccgatcaggattatggtcgtaaaggcagctccttcgcgccgttctttgcggtggaaaatgtcgccacaaccaatggcacctatgttctctcccgtctctctggcgcagccatgttgaccgtaacgatggtaagaaaagcggattacagcggatatcgtttgttcatcaccccagagatggaaggctacccgacagatgaaaatcaagccgctgcctatatgaacaagattatcgagaaagagatcatgcgcgcaccggagcagtacctctggatccaccgtcgctttaaaacgcgcccggtgggagaaagcagcttgtacatttaacaaactgctcttactctttccctcctcaaatcggccataataacctcatggtttttatggcttttttcttaaggttttttccttcgctgaatatctaattattaccgtcagaaattaaactgtcgccgatatgagacacttgtaagttactaaaagtaaataagaaaatgcctcttgtctcgtttcagttttaggcgtacattagcgccgtctcgagcagtttagctcagaattctggggtgatgcccacggtaaaatacagggcttttaaggtcgctttgcccggtgtcaactcactgtatcaggtgtaatgaagtcattcaggcgtaacagtaattacgcggagagatgtaaagtgaaatatttctttatgggcatttcttttatggtcatcgtttgggccggtacttttgccctgatgatctaaaagcaaactgtgcaatgaaaaacaggagccatcaggctcctgtttgcatttctgacgacggtgtttattccgcgttttcgtgaatatgtttgctgctggcgggtagtaaaccgtcggcacggaacatcgctttaatccctctgatggcctgacgaatacggtcgcggttttcaatcagtgcaaagcgaacatgcgtatcaccatagtcgccaaagccaatccccgggctgacacaaaccttcgcttcgttaaggagcttcttggcaaattccaggcttcccatggccgcatatggttccgggattttcgcccagacatacatgctagccttcggcatttcaaccatccagcccgcttcatgcagccctttaaccaatacatcacggcggcgtttgtactgttcggcaatgtcgcgcacgcactgttgatcgccctccagcgccgcaatcgccgccacctgcaacggcgtaaaggtgccgtaatcgtgatagcttttaatacgagccagggcgctgaccagcgttttgttgccaaccataaagccgatacgccagcccgccatgttgtagcttttgctcagcgtaaagaactcgactgccacatcgcgtgcacccggtacctgcataatactcggcgctttccagccatcgtagacgatatcggcataggccaggtcatggaccaccagcacatcgtagcgtttcgccagcgccactactttttcgaagaactccagttccacgcattgcgcggttgggttactcgggaagccgaggatcatcatcttcggtttcggataactttcacgaatggctcgctccagttcgttgaagaaatcgacaccttccaccagcggcacactgcgtacctgcgccccggcaatcaccgcgccataaatatggatcgggtaacttggattcggcaccagcaccgtgtcaccatgatccagcgtcgccagcatcagatgcgccaggccctctttgctaccaatagtgacgatggcttcactttccgggtcgatttcaacgtcgtagcgatcctgataccagcgggaaatggcgcgacgtaaccgcggaatgccgcgactagtggagtaaccatgcgtgtccgggcgctgggccacagtacataatttttcgacgatatgcggcggagtcgcaccgtccgggttacccatgctgaaatcgataatatcttcgccgcgccgacgcgcagccattttcagttcagcggtgatgttaaaaacgtagggcgggagacgatcaatgcgcgtaaagcgacgttcagggcgagtgtcagccataatttcctcagattaacgttagcgcccggaccgtccgagcgacgctgccacgatggtggctgttttgaaaatagcctgattaatttctgtctgtccagtgttttagaacattttattaatgacgttaaatgaggaactctgctttaaaaacaggaaatttatctgcgctaacaagaaaattaccactcattttattaacataataatttcaataaatttactaaccagaagtgcattatcaagagatgcattgctaatacaccatttatctatcaatccccttttaaaattgtggtttttcctcaaaaacggcctgctggtcatcagccttcaggttacctatcatagaggtttaatccttattcagagtcacccgtgcacgaaatattcaacatgctgctggcggtcttcgatcgggcagcgttaatgcttatctgcctgttctttctcatccgtatccgcctgtttcgcgaactgttgcacaagagcgcgcactccccaaaagaattgctcgccgttaccgccattttcagcctgttcgccctgttcagcacctggtccggcgttcccgtagaaggcagcctggtgaacgtacgtattatcgcggtgatgtccggcgggattctgtttggcccgtgggtaggcatcattaccggcgtgattgcgggtattcaccggtatttaattgatatcggcggcgtgacggcgatcccctgctttatcaccagcattctggcgggttgtataagcggctggatcaacctgaaaatccccaaagcacagcgctggcgcgtcggtattctcggcggcatgttgtgtgagacgttgaccatgattctggtaattgtctgggcaccaactaccgcgttggggatcgatatcgtctctaaaatcggcattccaatgatcctcggtagcgtctgtatcggctttattgtgcttctggtgcaaagcgttgagggcgaaaaagaggccagcgccgcgcggcaggccaagctggcgctggatatcgccaacaaaacgctaccgctgtttcgccatgtcaatagcgagagtttacgcaaggtctgcgaaattatccgcgatgacattcacgccgatgcggtggcgattactaataccgatcatgtgctggcctatgttggcgtgggtgaacataactatcagaatggcgatgacttcattagcccgactacccgtcaggcgatgaattacggaaaaatcatcattaaaaacaatgatgaagcccaccgcacaccagagattcattccatgctggtgatcccattgtgggagaaaggggtcgtgaccggaacgctgaaaatttactactgccacgcgcatcagatcaccagcagtttacaggaaatggcggtcggtctgagccaaatcatctccacgcaactggaggttagtcgcgccgagcagctacgtgaaatggcaaataaggcagagcttcgcgccctgcaaagcaaaattaatccccattttctgtttaacgctctgaacgctattagtagcagtatccgtctgaatccggataccgctcgccagttgatctttaatctgagccgttatctgcgctataacattgaattaaaagacgatgagcaaatcgatatcaaaaaagagctgtatcaaattaaagactatattgccattgagcaggcccgctttggtgacaagctgacggttatctatgatattgatgaagaggtgaattgctgcattcccagcctgctgatccagccgttggtggagaacgccattgtccacggtattcagccttgcaaaggtaaaggcgttgtcaccatcagcgttgcagagtgcggaaatcgggtacgcattgcggtgcgagataccgggcacggcatcgatccaaaggtgattgagcgggtcgaagcgaatgaaatgccgggcaataaaattggcctgctgaatgtccatcatcgcgtgaagttattgtatggcgaggggctgcatatccgccgcctggagccggggacggaaattgcgttttacattcctaaccaacgcaccccagtcgccagtcaggctacgttattgctttgagccggagtgatattgtgaaagtcatcattgttgaagacgaattcctggcacaacaggaactgagctggctaattaaagagcacagccagatggagattgtcggcacctttgacgacggtctggacgtgttgaagtttttgcagcataaccgcgtcgacgccatttttctggatatcaatattccgagcctggatggcgtgttgctggcgcaaaacatcagccagttcgcccataaaccgtttattgtgttcatcaccgcgtggaaagaacatgcggtagaagcgtttgaactggaggcgtttgactacattctcaaaccgtatcaggagagtcgtattaccgggatgctgcaaaaactggaagcggcctggcaacaacagcagaccagcagtacgcctgccgcgacggtaacgcgtgagaatgacaccattaatctggtgaaagatgagcgaataatcgtcacgccaattaacgatatctattacgccgaagcgcacgagaaaatgacctttgtctatacgcggcgtgaatcctacgtaatgccgatgaacattaccgaattttgcagcaaactgccgccgagccattttttccgctgccatcgcagtttttgtgtcaatctgaacaaaatacgcgaaatcgaaccgtggtttaataacacctacattctgcgactgaaagatctggattttgaagtgccggtcagccgcagcaaagtgaaagaatttcgccagttaatgcatctttaatcgggaactttcatgaaagcaccaggcttgcccgccgatcaacaatttttcgccgatctgttcagcggcctggtgcttaacccgcaactactggggcgcgtctggtttgccagccagcctgccagcttgccggtgggcagtttatgtattgattttccccgtctggatatcgtgctgcgcggcgaatacggcaatctgctggaagcaaagcagcaacgtttggtggaaggagaaatgctgtttattccggcgcgcgcggctaatttaccggtcaacaacaaaccggtgatgctgttaagcctggtgttcgctccgacctggcttgggttaagcttttacgatagccgcaccacgagcttgttgcatcctgctcgccagatccagcttcccagcctgcaacgcggtgaaggtgaagcgatgcttaccgccctcacccatcttagccgtagcccgctggagcaaaatatcattcagccgctggtgttaagtttgctgcatctttgccgtagcgtggtgaatatgccgccgggcaatagccagccgcgcggcgattttctctatcacagcatttgtaactgggttcaggataattatgcccagccgctcacccgcgagagcgtggcgcagttttttaatatcacgcccaatcatctgagtaaactgtttgctcagcatggaacgatgcgttttatcgagtatgtgcgttgggtgcgaatggcgaaggcgaggatgattttgcagaaatatcatctgagtattcatgaagtggcacagcgttgcggttttccggatagcgactatttttgtcgcgttttccggcgtcagtttggtctgacgccgggagagtacagcgcccgttttcagggctaacgtcagaaggttaattctgtttccagcagcgtcaggatactttgtgcatcttgcgcggcaaacaagctctggcggaagtttttattcaccagtttacgcgccagctggctgaagactttcacatgattcatcccttcgttagcacccagcgtcagcatgatcaccagttcgacttcgcccatttcactctgccagccaatcggtttcgccagccgggcaatgctgatactggaatgacggatccactgagatttggtgtgcgggatcgctacgccaaaaccaacgccggtggtaacaatctcttcccgctgccagacatcttcttccagctcaaacggatgttcagtgcgcccgttaacgccgaggttgccgcacaggaactggatcgcctgctctttattgctaaaatcctgatcaacaaagatattctccagcgccagcagtgggcgaacgtcttcttccggcgtaaaggcggtgagtaacgcttcaatttcctgcgcactgcggcattcacatgcctgacgcgccagttcccgacacgcctcgctatccagttgacgaagctggcttttcaccgccggaatacgcgggctactcatactcagctcatccaggcccagcccaagcagtagcggcagataacggctttcaccgcccagttcaccgcaaatgcctacccatttgccccgctgatgcgcagtggtaactatttgctgcaacatgcgcaggaagcttggcgtaatcgggttatatagcgggcttacgcgcgggttattacgatcgaccgcatacagatactgggtcatatcgttggagccgatactgaagaaatcgacctcatcgcagaagtggtcgatgatgtagcacacgctcggaacttccaccatgatcccaagcgtaatcgtctctgcatgacgcaggccatcgcgcttaagctcaacgatcgctttttggatctcgcctttcacccataagatctgatcgaggctgtgaaccatcgggatcatcaactgggcgttgccgaaactggcggcgcgcaaaatggcccgcagttgagtgcggaacaggccagcaaattccgggtaaatacgtaccgcgcgatagccgaggaacgggttctcttcctggggaatattcagataaggaatgcttttatcgccgccgatgtccatcgtgcggaagataatcggcttgtcgcccgccgccagtagcacctgctggtaggcttcaaattgctcctgctcgtccggcgcgctgtcgcgatccatatagagcatttcggtacggaacagcccgacaccttccgcgccgttggcaaacgcgcctggcgcttccagagcggtgccgatattcgccgcaatatcaatacgcttgttatcacgggaataggccagctgcgcggcagcctgcgcctgttgtttttggcgtttatccgccagcgtctgcgcgacctgataataaccgctcaccgcgtcattcgggttaatcgccagcacgccgcactgggcgtcaagcactgcaggttgcccggcataacgggcaatcgcatccagcggcaagccactcagtaccgggatcgcgctggcacgggccagaatcagtgtatggctggtgcgcccggttttctccagaatcatgcccgcaagatttttcaaatcaaggctcaaaaactggcttggggttaaatcttcagccaccagaatggtcggtttttcaagcaccagcttgttgcgcggcttcagttccggccaggtgatatgcagcaactgttcgctgatatcgcgaatgtcgctaacacgttcgcgcagataatcgctggcagaggcagaaagtttggcgcaaacctgctccatattgctgatgatcgccgcccccagcccctgatgctgttctgtcatcaggcgacggatattgcctgcaaattcatcatcctgaatcaggctcaaatgggcgctgaggatagttttgctttcgccgtcacgctcacgcaattgctggttcagttgctcggcaagcgttgccaggctgtgctccagccgggtggaatcttgcgcactggcggggattgcccgataactgtcgaggctgtcgctttgtaacagggtcagcgtacccacgccgacgccgcttgccagcacattgccgtacagtaaatccgggttaaggcggcttaaactacgcggcagcggatgcgccgtcagttctgcctgcgtaggctgaacgctgtcgctgtcgataaagcgcacctggatgtactcttccagcacgcgccgcgcctgctcttcatcgctgccgctaatgttcaggctgcaactgtcattaaatagggtgccggtgccaatcagcgccaggctgcttttcgcatctgcctttgcgttctggcgatggttaataaaagtgatttcgctttgccactggctgcactgttctttaagttcccacgccggacgagcatgtagaccgttaggcaaaggacagagaaattgaatcgttaacataaccgctccgggttaatcaggagatcatctgaaatccgtcagttgaacaaccgtctcacgcgtaagacgttgaataagggcagataaaagttgctgcatctgcaaaatgtcgcggcaatcggcaatgcttgcggcgcaatgtccatggcgggttgctggccccatcaccactgtgggcacgccggtgccggttaagtgcaccgccccgccgtccgtgccgccgttgctgaacatatctgcctgcaacggcacgccaatttctgccgccacggtttcgacccaggcggtaagttttggcggcgcaatcaggctcttgtcgcttaacaccagcatcggcccgttaccaatctggcgatggttagccgcgccataatcaaagtttttcgcccagcaggcggtatcaagcacaatggcgacgtccgggctcaccgcgcgggtggcagtttgcccgccgcgtaatcccacctcttcgctggaacttgccaccagccacacttccgcaggtagttcggcgtcgtgcagttcgcgcagtaacgtcaccagcagatagcaaccgaggcggtcatcaaaggctttccccatcactcgctggtgagggagaacctgaaaagtggtatcaaacgtgacgcgatcgccgggacgaattcccgcctgcatcacttcgtcataggagcgcgcaccaatgtccacgcgcatggcgctgacgtcattcccctgccggtcgccgtcaagcaggcctggaattttgcactcttcacgggtggtgatgcgcaccggctgcagctggcgggcagccatgcgtacgttgccaaccggcagcacatcaatcgccccttcgcgggagatgctgcgcaccataaatcccacttcgtccatatgcgcacagatcatcaccttcggacctgtgctttcattcaggcggatcagcacgcttcccagaccatcaaatcgcacttctttttgcaggcgatccgcttcttccagcaggatctgccgcacttcctgttcgctggaggcgatcgcatctgcctcgctcaacgcttttaataggcttaaatccattatgcctctcccgtgagcaacactgttttcggcatggcgtagagcacttctgcgccttgcggggtaaccagcacaacatcttcgatgcgcacgcccccttgccctggcaaataaatccccggctccacggtcagtaacatgcctggctgtagcgtcgtggtgtcccgcggactaaaacgcggatcttcatgaacttcaatgccgatagcgtgaccggtgttatgaccgaaatagtcgccataacctgcttctgtaatgacccggcgcgcggcatcgtcaacctgctggcagcgcacgccggggcgaatcgcggagattgctgcgagctgtgcctgcaggacaatttgatagacgttaaacagcaggtgagattcggcgctcaccccttcgccattcaccagcaaggtgcgcgtcatatcagagcagtagccctgatacagcgcaccgaaatcgagagtgacaaactcgcccgctgcaacaatcttgtcgctggctttgccgtgcggcagcgccccacgccagccactggcgacaatggtgtcaaaagaggctttttctgcgccctgctggcgcataaaccactccagttcagcggctatctcgcgctcgctcatccccgcctgaataaagcggcgaatatgctctgcaccgcgatcagcaatcccacaggcgaggcggattttctccacctcctctggcgttttgatttgccgcagcacatccggcgtggcgctaaccagtttcgcattgagttcagactgccagcggtgcgcggtttcccaactcacctgctggccctcaaaaccgagcgtttgcaactgttcatcggcaatgatttgattgacgatagtggtaagcgtgttcgtcgcgtcaagcaaatgcagctggtagccttgcgcacgggcttccacctcaacgtaatagcggctatccaccagaatgtgcgcactttcacggctaatcaccacataaccacttccggtggagatccccagatgcggctgtttgttctgccgactggagagaagcactgcatccagttgttgcgccttaagccagtcgcgcaggctagcgagtaatgtcatctggattttccttcttacaggctatcgattaacaatttgcctttacggaacatcatcagacgcaggaacaccaccatcagcgcagttatgactgcccccagcgcgatccccgccatatagacgcccaggttagtgaccagcggccatgcccagatagcggactccgggaaccattgcactgcgcccagccagacagcggcggtactgccgacaatagcgccgaccatatagctcggaatggcggtgatggggctttccagcgcaaacggaatcgcaccctcactgatccccataaacgccaggaacatggcggtcttaccctgcggataaagttgagcgttgaacaggcgtttgccggttaaacgacggtcgataatggtcgccagccccagaccaatcggcggaataacgatagcgatagaacgagcggtgaccggtaatacgtggtcagtggtaaagctgaaggcaacaaaacctgcggctttgttgatcgggccaccaaggtcgattgctgtcgccgcggcgatccccattgcgtacatcagcgcgcccttctcacctgcggcagtcagcacagtacggataccgccgttgatccagccaccaaagggggtgatgacgtagtacatcgccagcatgacaaaaatggcggaaagaatcgggagcaaaaatgtggttttgaacgctaacaggaaatccggtaactggattttctggttcatccacttcacaaggtaaccggcaacgatagaaataatcagcgcaccaatgaaggtggacggcaccgggctagaggtcgcccattgcatagtgctgggatcgaagttcagcagttgcgtcggctgggtagacatcaacccgccgataaaaccagccgggaacgccagtttgccaccgatagagttcgccacaaaagcagcaaacatcggaatggcaaaaccaaacaacacgccgccgaaggactggctcagccaggcaaatttaagtaaggagaggtcgaaaccggagaatttcccgctattaagagcatccatgatgccgatctcagcaggaattttaagccagctataagcaatcagctggctgaaagcgaggatcacaccgcccataattaaggtcggcaccatgcgactaatcccactcatcacatgctgcgggagttcaccccagaagctggttttagaggcctgcggattcttaactgccgctgccgcaccggatgcgccaggcacaacggttgcactgcgttttttaatggccataacaattatccctgtcgaatattactgttgttcagaggcaatcatctcttcgatttctttgatgatgcccgcagcgtttttaattgcgtcctgcaaagtgatttcataaacgtcgcgactttcgaaacgttcgttatcttccggggtaactgccacggagtggatgatgatggtcgcttcggcgatatcctgcgccgtcaggcgattctggataccgtccgcgccctgggtttcaattttcacttcataaccggcttctaccgccgcttcttccagcgcctgagcggccataaaggtgtgagccaggcccatcgggcaggcacataaggcaatcagtttcttactcatcgttaattcctcgttcagtgatagttgacgagtgaaattatgaacgtgcaaaacaaatcgccgttaccagacaaataatgcatttactggagaattaatcccgctgtacggaagtgtgacgcaggtcgaccttgtgaggggacacaaagaaaaattgaataaactgtatgatttaaaagattatcgggagagttacctcccgatataaaaggaaggatttacagaatgtgacctaaggtctggcgtaaatgtgcaccggaaccgagaaggcccggattgtcatggacgatgagatacaccggaatatcatggacatattctttaaagcgccctttatcttcaaatgcggcacggaaaccggaggctttgaagaactcaaggaagcgcggcacgataccgcccgcaataaacacgccgccaaatgtcccgagattgagcgccagattgccgccaaaacggcccataatgacgcaaaacaggctcaatgcgcggcggcaatcggtgcagctgtcagccagcgcgcgttcggtaatatcttttggcttgagattttctggcaggcggttgtcagctttcacaattgcgcgatacaaattcaccagcccagggccagaaagcacgcgctccgcgctaacatgaccaatttccgcacgcaatatttcgaggataatggcctcttcttcactattcggcgcaaaatcaacgtgaccgccttcgcctggcaagcttacccaacgcttatcgacatggaccagatgcgcaaccccaagccccgttccggcaccgtaaaccgcaataggcttaccttcgaccggttctgcgccaccaaactgaatcagatgctcttttttcagcatcgggatcgccatgcttacagcggtaaaatcgttaataatttccagatggctaaaaccgagattctttttcatttcggcaatactgaacgcccaggtatggttggtcatcgccacccagtcaccggtaattgggcaagcgatggcaatacagccgtctttcacctcgaccttatgttcttcaagataaacgcgaatgaccgcttcgaggctggggtaatcaagcccactataggtcttagcctggctgatttcaccactggcaatatcacacagagcaagacgtgcgttggtgccgcccacatcaccgactaatgcatactttgtcattcttcaactgctccgctaaagtcaaaataattctttctcacactgtaaatacctgggggcataacaacaacgccggaaaggcaggctccctgtaaatatcgatctgggtcacacaattactttatcgtttcagcaccaattgcagcgatgcctttttgcaagctgggcaaactaagtatctgaccccgcataaggaatagaacacaggcggcactaacccggacgtagactgtattacaaaagcggcaaaaagcagagacaaaaaacccccgctttgcagcgagggttggaaatttggtggagctaagcgggatcgaaccgctgacctcttgcatgccatgcaagcgctctcccagctgagctatagccccacgatgcgtttacgtaccaagtttgctgggtgcaaaatttggtggagctaagcgggatcgaaccgctgacctcttgcatgccatgcaagcgctctcccagctgagctatagccccgtcacgtaaagcttgtcgagttgacgggcggcatcatatgaattccgcccgaatgtgtcaacggcaaattgcaacgtgtagtttcaatcgctgaaaaatcaggcaaatgaacaattttggaaaaccgctcgcattcagtagttattcatgtcacggtttcctgtaaagtggtgttataaaatgaactactaatagacccacatacattcagggaattgttatgttcaaggagaggatgacaccagatgaacttgccagactgaccggctatagccgccagaccattaataaatgggtacgcaaggaaggctggacaacgagtccaaaacctggcgtccagggtggcaaagcccgactggttcacgtcaatgaacaggttcgtgaatatattcgcaatgctgaacgtccagaaggtcagggagaagcgcctgccctttctggtgatgcgccgcttgaagtattgctggtgacactggcgaaagagatgacgccagttgaacaaaaacagtttacatccttgcttctgcgggaagggattatcggattgttacaacgcttagggattcgcgatagcaaataatatgaaaagattacgcaataaaatgaccaccgaagaactggctgaatgcctcggtgtggctaaacaaactgttaaccgttggatcagagaaaaaggctggaaaacggaaaaatttcccggcgtgaaaggcggtcgtgccagacttattctggtcgatacgcaagtttgcgagtttattcagaacacgccagccttccataacacaccaatgttgatggaagctgaagagagaattgctgaatacgctcctggagcacgcgccccggcgtatcgacaaatcatcaacgcgatagataatatgacagacattgagcaggaaaaagtcgcgcaatttttgagtcgtgaaggaattcgcaatttcctcgcccgtctcgatattgacgaaagtgcataaataaaaaacggcaggatattatctcctgccgtttatctttttacacgctaattactgctgattttcgcgttcagcaataaaatccagcgctttgttgatacgctcgatactgcgggtcttaccaattgcgtgaacggtaacatccagtgctggagactgccccgcaccggttacggcgacacgcagcggcataccaactttacccatacccacttccagctcatccgccgtcgcctgaatagcgtgatgaacgttttcagcggtccagtcagtaatcgcggccagtttgtcacgaaccacttccagcggctgacgcgctaccggacgcagatgttttttcgcggcgtcggcatcgaactcagcaaaatcttcgtagaaataacggcagctctgtgccatctctttcagcgtcttgcagcgttcgcccagcagtttcaccagatcagccagctgcgggccgttacgggtatcgatattttcctgctcaatgtgccactgtaagtgagtagcaacatactccggcggcagcgcgttaatgtagtgatggttcagccacagcagcttgtcggtgttgaacgcactggcagatttgctgacggcattcaaagtgaagtatttgatcatctcttcacgagtgaagatttcctgatcgccgtgggaccagcccagacgcaccagatagttcagcagtgcttctggcaaataaccgtcatcacgatactgcattacgctgactgccccgtgacgtttggacagttttttaccgtcatcgccattgatcatagaaacgtgcgcgtaaaccggcaccggcgctttcagggccttaagaatgttgatctggcgtggcgtgttgttgatatggtcttcgccacggataacgtgggtgatttccatatcccagtcatcgacaaccacacagaagttataggttggggaaccatcggtacggcggataataagatcgtccagttcctggttgctgaactcgatcggaccacggatctgatcgtcaaaaacaacagaaccttcctgcgggttagcaaaacgtacaacacacggttcatcatcagcatgatgctcatggctgtggcggcagcgaccgtcataacgcggcttctcacctttcgccatttgctcttcgcgcagcgcttccaggcgctctttagagcaatagcatttataagcagtgccctcttccagcatctgatcgatcaccgcgttgtagcgatcaaaacgtttggtctggtagtacggaccttcatcccactccaggctcagccagttcatgccatccataatggcttcgatagcttccggcgtggaacgctcaagatcggtgtcttcaatacgcagcacgaactcaccgccgtggttacgtgcaaaaagccaggagtaaagagcagtacgcgcgccgccaacgtgcagatagcctgttgggcttggcgcgaagcgagttttgattttcatgaaatggccttacgtttagaaagatgccgacaaccggcaaatcctggaaaaattaagtgggcgatattctatcactcccgcctgattcctcaatgtagttcgggtttctaccttacgcattattgttttcgttgacaaattgcgcaacacggtctgttttgcgatcatcttgcttaaatttacgacgaacgaacaatttctttagaaaatgcgttgactcattttgaactctccctataatgcgactccacacagcgggggtgattagctcagctgggagagcacctcccttacaaggagggggtcggcggttcgatcccgtcatcacccaccaactactttatgtagtctccgccgtgtagcaagaaattgagaagtgggtgattagctcagctgggagagcacctcccttacaaggagggggtcggcggttcgatcccgtcatcacccaccactttctcgccagctaaatttcttgtaaaaatgtgaagtaccgaagtgggtgattagctcagctgggagagcacctcccttacaaggagggggtcggcggttcgatcccgtcatcacccaccacttcgggtcgttagctcagttggtagagcagttgacttttaatcaattggtcgcaggttcgaatcctgcacgacccaccaatgtaaaaaagcgccctaaaggcgcttttttactatctgcgatactcaaagattcgaacctgcagcaggtttgagttgagcgcagcgaaacaacggagccgctcgtgctggcgacggcccgaagggcgagcgaagcgagtcatcctgcacgacccaccaatgtaaaaaagcgccctaaaggcgcttttttgctatctgcgatttgcgaaattgcctgatgcgcttcacttagcagactactatttccggcaattcctgtctcctcacttactgtgtcaatgcagccaacagcttaaccatcgcgggcgtcacctgctgtgtttcataaacaatatataaatctgcagggatgcgctgtttgagcggacggaaaatgacacctggccagttcatttgtgcgtagctgtccgctatcaatgtgataccaatgcccatactgaccatagcgagtaccgtttgcggttcattaacttcgcgaataacaaccggactaaatcccacctgctggcaaactcgctgcaaaaaatcccagtcagtgtaaacgggcggcattgtaacaaaatactcgtcacgtagcgcttccagcgggacggtggaaaaactactgagatgatgctcttcaggcatcgccaccagaaacgcgctttcatgcaaccgtaagctggtaaaaccagtcggtggttctgtcgccattcgccagatcccggcatcaagttcgcggcgttccagcaaggccatttgcatcgcgggcatcttttcgcgaaaaagaacgtcaacgttaggattttccctgaggaatcgccgcataaccgggcgcatccgtccccacattgccgttcccactacgccgagttcaatccgccctgcttctccccgacctatttgttcaatccgagccaatacattattagcattcaccagcaatcgacggctttcttccatcaagattttgcccgcgtgtgtcagtacgacgctgcggctatggcgaataaaaagctgcgtgccgagttgattttccagctctttaatatgaatgctgagcggaggctgagacatatttaaacgcgctgctgcgcggccaaaatgcaactcttccgctacggcaagaaaataacggagcaacttaagatctgttctgtatacgcgttccataattaagtgctccatataataaatacatcgtattaaattatcatggcataaagtatttcaccaccagatatccgacatacataaacacaatggataatatacccggtaatacatttggtacaggaataggcaagcgcacgattgtaaacaaagcaccaataccaaaaccaacgccggaagaaaataaaatatctttcactaattaacctttatcataaaagcagctctgaagagcagagccgcgaatccttttaatgagtcaccgctcgatgctttatcttttcagggtcatgattatatttaaacccaaagaaaaatatcactgcgagaaaaagagcatatcctgcaaacaccagccagatagtttgccagtcttttacgccatccacgctaaagtaatctactgccatgccactcagaatgctgccaacccatgcgccgacaccatttaccatggtcataaagagcccctgcgcgctggcacgaatgctggaatcaacttcctgttcgacaaatacgctaccagaaatattgaagaaatcgaatgcacagccataaacaatcatgctcagcagcagcaaaataaatccggttgtactcggatcgccataggcgaagaagccaaagcgcagcgtccaggccaccatactcatcagcatgacggttttaatgccaaatcgctttaaaaagaatgggatagtcagtataaagcccacttctgccatctgactaacactcagtaaaatggagggatatttcaccacaaaactgtcagcaaactccgggttacgggcgaaatcatgtaggaacggattaccaaaaacgttggtaatttgcagtaccgcacccagcatcatggcaaagaggaaaaagatggccatgcgtggatttttaaacagcacgaaggcatccagacccagcttgctggcaaggcttgtggtcgcttttttctccgcaaccggaatcttcggcaaagtcagcgcataagcgctcagcagcaaactcgcaccggacgcgatatacagctgcagactactcaattccagatgcagcaggcttactgcccacatcgcgacaatgaaccccaccgtaccaaaaacgcgaatgggcgggaaagcggtcaccgggtcaagccctgcctgggcaagacaggaataagagacgctgttgcttaacgcaatagtcggcataaacgccatcgcattgactaacatcacccaaaacatcatatccggatcagttacggatgccgcataaaaaagtacgcccgcacacaccaggtgacacagcatgtatgcacgttctgcgcgcagccatttgtctgcgatgatccccattataccaggcataataatcgcggcgatccctttggaactgtaaaccatgccaacattagcgccggtgaaatgaagagtattaatcatgtaagagccgagggtaaccagccagctcccccagataaaatattgcaaaaaggacattacctttaagcgcatcgcgatgctcataatcgtttccttgtcgcatcatttggcctcacccgcgaggccgtttcttattgtttttctcaggcaattttgcgcagaaagccacaaataaggttgatgaagttctgcttagagagctccgcagccgccagcgtttgcgcatgactcaatttcacatcgcttaaaccttccgccatattggtaatcgcagagaccgcaacgactttaaggtcgcaatggcgagcactaataacctcaggcaccacagacataccaacaacatccccaccaataatttgcatcatgcgaatttccgccgcagtctcgaaattcggccccggatagctgacgaacacgccctccgtcagagggaaaccctcttctttcgccactttttgtaacagtgcgcggtattccgcatcgtaggcatttgccagactgaagaagcgctctccaaaacgatcatcgttaagacccaccatcggcgtaccgggcatggtgttgatatgatctttcaatgcgaccaggctgcctgcccccacttccggacgcaggctgcctgccgcattggtgcagaacagtagctcgcagcccagcagcttaaaggtacgaattgcgtcagtcataatggtcattccacgaccttcgtagaaatgtccgcgacctttcatacataccaccggtacgccctggagatggcccagcactaactcccccgcatgaccatgtaccgtacttaccgggaagcccggcagcttttcgtaggaaattgcgacagcgttctcaatctgatcggccagcgcgccgagcccggaacctaaaataaaggccactcgtggcgtgaaatcaggtttataagtcttgataatatctatgcaaaacagcgggttatgagaaaattgaacctgagacatacatatcctttttctgtagggtggaatctaacgcctttttatagcgaggttgtcccggctcttaccaatacacttttctcacgcattcaatagcgattcgatatcgatggatttatatcttttctctattaatccacggtaaaaactgtattggcgatattaattcctttgcattaacaatatgtcgtttttagcaaaccactttattaagcaatctactaataacgatcggcatagggaattatgctatgaaaaaacatcttttaactctgacactttcctctatattagcgatacctgttgtatctcatgcagaatttaaaggcggttttgcagatatcggcgtgcattatctggactggaccagccggactaccgaaaaaagcagcaccaaaagtcacaaagatgattttggttatcttgaatttgaaggtggcgctaactttagttggggagaaatgtacgggttcttcgactgggaaaacttctataacggtcgccataataaaccaggtagcgagcagcgttatacctttaaaaataccaaccgtatttacctgggtgacaccggatttaatctctacttgcatgcgtatggcacctacggttctgcgaatcgcgtgaatttccacgacgatatgttcctgtacggtatcggctacaatttcaccggcagcggttggtggttcaaaccgttctttgctaagcgttatacagatcaaacctattacactggcgacaacggctatgtcgccggctgggttgcaggttacaactttatgctgggcagcgagaaattcactcttaccaactggaacgagtacgagtttgaccgtgacgctacctatgcagcgggtaatggcggtaaagaagggctgaatggcgcagttgcactgtggtggaatgcaacaagtcacattactacggggattcagtatcgatatgcggatgacaaactgggcgaagatttttaccaggatgcgataatctactccatcaaatttaacttctgattgattactgccggggctcccggcagtatgaattcactttatatctgatacaacggatccccttcccgcccagccattagcgcattgccctggtctcgtaccacgtcccataaagcttcagcggcggtggaaagactacggttcttcctgcgcaccagcatcaactggcgttcaacaaccggcgtaatgcgctttaccaccagtgggctaccttcaggcaatggtagcgccagtgcgggaagaatactgatgccgatgcctgcggctaccatcgggaacagcgtcgccggatgtccaatctcctgcacaatattcgcctgaataccattgcgcgccagcgctgcgtcaatcagcggtcggctgccactcgcgtaatcctgcaacaccaatttcgctccctgtaatgcctgccagggtacataatcttccacggccaaagcgctatcgcgatggcaaagcagaaagaaaggctcggaaagaatcgcttcacattgcagatcgcccactgggcctggatcgatgacgatgccaaaatcgacatctccctggcgaatactttccattacccactgctgcggacgatcgtgcaggacaaactgaatatctggatagcggcgatggctttcagcaatgcattgcggaataagatgcgcggaaatggtctggctggcagcgacccgaacttttccgctcagttgttgccccatacgcccggtatcgcgcaacgtgctgttcagttcatccagcagtcgctcaagacgcaaagccagctgctgccctgcatctgtaagcaccacttcacgcgtggttctgtccagcaggcgaacaccagtatgattttccagttccttcacactgtgactcactgcgctctggctcaggccgatacgctctcctgcacgactaaaacttttctcctgcgctactgtgacgaaaacctttaattgttttaaagaataattcatctgttttcttcatgaatggatgcaataaatcaattttatttctcaaactggaagaagcacaatagaaccatcgatcatctggagtctttatgaaactttttcgtatcctcgatcctttcaccttaaccctgatcacggtggtgttgctggcctctttctttccggccagaggcgatttcgtccccttctttgaaaatctgaccaccgcagctattgccctgctgttctttatgcacggcgcgaagttgagccgtgaggcgattattgctggcggtggtcactggcgactgcatttgtgggtaatgtgcagcaccttcgtgctgtttccgattctgggtgtactgtttgcctggtggaaaccggtaaatgtcgacccgatgctctactccggttttctctacttgtgcattctcccggctaccgtgcagtctgcaatcgccttcacgagtatggcgggcggtaacgtcgcggcagcggtttgttctgcgagcgcatccagcctgctggggattttccttagtccattgctggttggtctggtgatgaatgttcacggtgcagggggcagccttgagcaggtcggtaaaattatgctgcaactgctgctgccgtttgtgttggggcatctttcccggccgtggattggtgactgggtgagccgcaataaaaaatggattgcgaaaactgaccagacgtccattctgttggtggtttatacagcgttcagcgaagccgtcgttaatggtatctggcataaagttggctggggaagtttgctgtttatcgtggtggtcagctgcgttcttctggctatcgtgattgtagttaacgtctttatggcacgccgactgagcttcaataaggcagatgaaattactatcgtcttttgtggtagcaaaaagagtctggcaaatggcatcccgatggcaaacattctgttccccacaagcgtgatcggtatgatggtgctgcccctgatgattttccatcagatccaattgatggtctgtgcggtgctggcgcgtcgatacaaacgccagaccgaacagttacaggcgcagcaggaaagcagcgccgataaagcttaaagcggacgcttcaggggctggaccagttgcgtcagcccctcggttttaatcagcagcgtgatttgcattagctcaccgagcttccctgccgggaactcatctttgcgggcaaaccacagcagatactcctccggcaggtcgattaagcgacgccctttgtatttgccaaacggcattatcgtattggctatttcaatcagctgctctttttccatctcagctacccagcaaacgcagcatttccgcttcgtcgatgacttcaatgcccagttcctgcgccttcgccagtttagatcctgcagcttcacccgctatcaccagatcggttttcttgctcacgctgcccgcgactttcgcgcccagttcgaccagtcgagctttagcgtcatcacggctcatctggcttaagctgcccgtaagcaccacggttttaccagcaaacgggctgtcaatctcttccgcgttgataacgatcggcgcaggccagtgaacaccttccgccaacagctcgctgatgacattgcggttgctttcttcggcaaagaagttgtgaacgtgggatgcaacgacaatgccaacatcaggcaccttttgcagctcttcaatgctagcggcttccagcgcttccagcgtgccgaaatatgccgccagacctgctgcggtggcctcgccgacttcacggatgccaagtgcatagaggaagcgagcaaaggtggtttctttcgctttttccagcgcgttaaccacgttttgtgcgctttttggccccatacgctccagtccggtcagtttgcctgcggtgagtttgaacagatctgccggagtatggacatattctttttcaaccagctgatcgatgattttgtcgcccattccgtcaacatccatcgcacggcgggaaacaaagtgtttcaggctctctttacgctgcgcaccgcaaatcaggccaccggtacagcgggcaaccgcttcaccttccacacgctcaacgtcagaaccacataccggacaatgcgtcgggaatacaacctcacgggtatcttccgggcgttcagaaagcacgacgttaaccacctgcgggatcacgtcgccagcgcggcgaatcaccactttatcgccaatgcgtaaaccaagacgttcgatttcatccgcattgtgtaaggttgcgttactcaccagcacgcctgcaacatggacaggttccagacgcgcaacaggcgtaatcgcgccagtacgcccaacctgaaactcgacgtcacgcacaaaggtcatctgctcctgcgccgggaatttaaacgctaccgcccagcgcggggcacgcgcgacaaagccaagctgctcctgctgtgccagactgttgaccttaatcaccacgccgtcgatatcaaagcccagcgtcgggcggtcttcttccactttgtgatagaacgccagcacttcttccgcgctttcacaaagcgttacccgatcgctgaccggcaacccccactttttaaattgcagtaaacggccaagatgagtatccggcagctcgccaccttccagaacaccaacgccatagcagaaaaaagtgagcggtcgcttcgctgtaatacgcggatcaagctgacgcagactaccagctgccgcattacgtgggttagcaaacactttcccgcccgtgcgtcgcgcatcttcgttaatcttttcgaaccccgcctgcggcaggaacacttcaccacgcacttccagacgcgccgggatattctctccgtgcagcttcagcggaatggcgcgaatagtacgcacattagacgtgatatcttccccggtggtgccatcgccacgggtcgcggcactgactaaaacgccattttcatacagaatactgacggcaagaccatccagcttcagctcacagcaccaggtgactttctcgttgtttttcagacggtcctgcacacgtttgttgaaagcaagaaagctttcttcatcaaaaacgttatccagactcagcattggtacttcatggcgtatctggctgaaagccgccagcggcgcagcgcctacacgttgagtagggctatcaggcgtaatcagttctggatgtttggtttccagctcgcgcagttcgcgcatcagcctgtcgtattcagcgtcgggaatttccggcgcatccatcacatgataaagatattcatgatggcgaagcgtcgttcgcagttctgtcagttgttgttcgatactttccatatcgcaccatcaatgctaaaaacccccgacaagcgggggttcgaagaggagttaatttgccttaagtgtatcaggcgttggcgtctttgacttcgcggatgatgtcctggtactcgcgcaatttctgcggagtcatcatacggcgctgatcgtcaagcacgacaccgcccacttcatcggcaatatgctgcgcagattgcagcatcagcttgaagttctgcagctcgtcaccgtaagacggtacctgcataaagatagtgacacccggagtagtgaaatccttcatttcaggatcaaaggttcccggtttcaccatattcgccaggctgaataacgccgggccgctgccatccgggctaagatgacgatggtaaatattcatatcgccaaaaatgaagcccgcttgttgaatgctgttaagaagcagttcaccgtttagctcgctaccgtgatgcgccgcgacgttcatgataatcaccgcttctttgcgcttcggtttatccataactggagcaggttccgctacaggctcaggctgtggtgccgctacgggttctgcaggctggaaagcctgttgtgccggttgcggtgcactatgcacaggctgcggcgctggcgcgacctgtgggctaactggctgctgcaacggctgttcaggctgcggctgataggcaggctgctgcaccggctgcgctggatgcggagcatgttgcggcggtacctgcgcttcaggcggctgctggaccggttgacgcggctgcgcagacgcataaggcggttggtactggtgttgcgggctcggacgagcagcctcatgctcctgagcgttagccggggcatgattcacgcggtgaacacgaacctcaccaacgccctcatcatcttcgacatcctcgtcataagaatcgtcgtcacgtttactcttcattcgttttaatggccgatcgcggaacatagaagatcgttctttacggctggtccagaaaccatgtaccagtaaagcgattatggcgatcgcgccaacaatgattaatatcagacgcaaatcctgcatcattatattctctgttgttctaacaccttgccaccacggcaaacatttactcactaagagtatttgccgattacctcaagtgcaagtgcactattaactttcacagcacaaagatagatgaaatcgtgctttttgctgttttttcgaacatatcctaactgtccattgcgcaattacccggtaaaatacgcagaattttcctgggattggtcaaaaggagctcatcctgattatggttagtagtttcacatctgccccacgcagcggtttttactattttgcgcaaggctggaagctcgtcagccaacctgggattcggcgtttcgttattttaccgctgctggtcaatattttgttgatggggggcgcattctggtggctctttacacagctcgatgtctggatcccgactctcatgagttacgttccggactggctacaatggctgagttatctgttgtggcctctggctgtcatctctgtgctgttagtgtttggctatttcttctccacgattgctaactggattgccgctccgtttaacggtttattggctgaacaactggaagcacgattgactggcgctacaccgccagataccgggattttcggtatcatgaaagatgtgccgcgaatcatgaaacgcgaatggcaaaaatttgcctggtatctgccgcgcgcaattgtattactaattctttacttcatccctggtattgggcaaaccgtcgcgccggtactgtggttcctgtttagcgcctggatgttagccatccagtattgcgattaccccttcgataaccacaaagtgccgtttaaagagatgcgcaccgccctgcgcacacgcaaaatcaccaatatgcagtttggtgctttaaccagcctgtttacgatgatcccgctgcttaatctgttcatcatgcccgttgccgtttgtggcgcgacggcgatgtgggtcgattgctatcgcgataaacacgcgatgtggcggtaacaatctaccggttattttgtaaaccgtttgtgtgaaacaggggtggcttatgccgccccttattccatcttgcatgtcattatttcccttctgtatatagatatgctaaatccttacttccgcatattctctgagcgggtatgctacctgttgtatcccaatttcatacagttaaggacaggccatgagtaagatttttgaagataacagcctgactatcggtcacacgccgctggttcgcctgaatcgcatcggtaacggacgcattctggcgaaggtggaatctcgtaaccccagcttcagcgttaagtgccgtatcggtgccaacatgatttgggatgccgaaaagcgcggcgtgctgaaaccaggcgttgaactggttgaaccgaccagcggtaataccgggattgcactggcctatgtagctgccgctcgcggttacaaactcaccctgaccatgccagaaaccatgagtattgaacgccgcaagctgctgaaagcgttaggtgcaaacctggtgctgacggaaggtgctaaaggcatgaaaggcgcaatccaaaaagcagaagaaattgtcgccagcaatccagagaaatacctgctgctgcaacaattcagcaatccggcaaaccctgaaattcacgaaaagaccaccggtccggagatatgggaagataccgacggtcaggttgatgtatttattgctggcgttgggactggcggtacgctgactggcgtcagccgctacattaaaggcaccaaaggcaagaccgatcttatctctgtcgccgttgagccaaccgattctccagttatcgcccaggcgctggcaggtgaagagattaaacctggcccgcataaaattcagggtattggcgctggttttatcccggctaacctcgatctcaagctggtcgataaagtcattggcatcaccaatgaagaagcgatttctaccgcgcgtcgtctgatggaagaagaaggtattcttgcaggtatctcttctggagcagctgttgccgcggcgttgaaactacaagaagatgaaagctttaccaacaagaatattgtggttattctaccaagtagcggtgagcgttatttaagcaccgcattgtttgccgatctcttcactgagaaagaattgcaacagtaatgccagcttgttaaaaatgcgtaaaaaagcacctttttaggtgcttttttgtggcctgcttcaaactttcgcccctcctggcattgattcagcctgtcggaactggtatttaaccagactaattattttgatgcgcgaaattaatcgttacaggaaaagccaaagctgaatcgattttatgatttggttcaattcttcctttagcggcataatgtttaatgacgtacgaaacgtcagcggtcaacacccgccagcaatggactgtattgcgctcttcgtgcgtcgcgtctgttaaaaactggcgctaacaatacaggctaaagtcgaaccgccaggctagactttagttccacaacactaaacctataagttggggaaatacaatgttccagcaagaagttaccattaccgctccgaacggtctgcacacccgccctgctgcccagtttgtaaaagaagctaagggcttcacttctgaaattactgtgacttccaacggcaaaagcgccagcgcgaaaagcctgtttaaactgcagactctgggcctgactcaaggtaccgttgtgactatctccgcagaaggcgaagacgagcagaaagcggttgaacatctggttaaactgatggcggaactcgagtaatttcccgggttcttttaaaaatcagtcacaagtaaggtagggttatgattagtggcattttagcatccccgggtatcgctttcggtaaagctctgcttctgaaagaagacgaaattgtcattgaccggaaaaaaatttctgccgaccaggttgatcaggaagttgaacgttttctgagcggtcgtgccaaggcaagtgcccagctggaaacgatcaaaacgaaagctggtgaaacgttcggtgaagaaaaagaagccatctttgaagggcatattatgctgctcgaagatgaggagctggagcaggaaatcatagccctgattaaagataagcacatgacagctgacgcagctgctcatgaagttatcgaaggtcaggcttctgccctggaagagctggatgatgaatacctgaaagaacgtgcggctgacgtacgtgatatcggtaagcgcctgctgcgcaacatcctgggcctgaagattatcgacctgagcgccattcaggatgaagtcattctggttgccgctgacctgacgccgtccgaaaccgcacagctgaacctgaagaaggtgctgggtttcatcaccgacgcgggtggccgtacttcccacacctctatcatggcgcgttctctggaactacctgctatcgtgggtaccggtagcgtcacctctcaggtgaaaaatgacgactatctgattctggatgccgtaaataatcaggtttacgtcaatccaaccaacgaagttattgataaaatgcgcgctgttcaggagcaagtggcttctgaaaaagcagagcttgctaaactgaaagatctgccagctattacgctggacggtcaccaggtagaagtatgcgctaacattggtacggttcgtgacgttgaaggtgcagagcgtaacggcgctgaaggcgttggtctgtatcgtactgagttcctgttcatggaccgcgacgcactgcccactgaagaagaacagtttgctgcttacaaagcagtggctgaagcgtgtggcagccaagcggttatcgttcgtaccatggacatcggcggcgacaaagagctgccatacatgaacttcccgaaagaagagaacccgttcctcggctggcgcgctatccgtatcgcgatggatcgtagagagatcctgcgcgatcagctccgcgctatcctgcgtgccagcgctttcggtaaattgcgcattatgttcccgatgatcatctctgttgaagaagtgcgtgcactgcgcaaagagatcgaaatctacaaacaggaactgcgcgacgaaggtaaagcgtttgacgagagtattgaaatcggcgtaatggtggaaacaccggctgccgcaacaattgcacgtcatttagccaaagaagttgatttctttagtatcggcaccaatgatttaacgcagtacactctggcagttgaccgtggtaatgatatgattagtcacctttaccagccaatgagtccgtccgtgctgaacttgatcaagcaagttattgatgcttctcatgctgaaggcaaatggactggcatgtgtggtgagcttgctggcgatgaacgtgctacacttctgttgctggggatgggtctggacgaattctctatgagcgccatttctatcccgcgcattaagaagattatccgtaacacgaacttcgaagatgcgaaggtgttagcagagcaggctcttgctcaaccgacaacggacgagttaatgacgctggttaacaagttcattgaagaaaaaacaatctgctaatccacgagatgcggcccaatttactgcttaggagaagatcatgggtttgttcgataaactgaaatctctggtttccgacgacaagaaggataccggaactattgagatcattgctccgctctctggcgagatcgtcaatatcgaagacgtgccggatgtcgtttttgcggaaaaaatcgttggtgatggtattgctatcaaaccaacgggtaacaaaatggtcgcgccagtagacggcaccattggtaaaatctttgaaaccaaccacgcattctctatcgaatctgatagcggcgttgaactgttcgtccacttcggtatcgacaccgttgaactgaaaggcgaaggcttcaagcgtattgctgaagaaggtcagcgcgtgaaagttggcgatactgtcattgaatttgatctgccgctgctggaagagaaagccaagtctaccctgactccggttgttatctccaacatggacgaaatcaaagaactgatcaaactgtccggtagcgtaaccgtgggtgaaaccccggttatccgcatcaagaagtaattcttgccgcagtgaaaaatggcgcccatcggcgccatttttttatgcttccgccagcggcggcaaaatcaattcatcgctctcatgctgctgggtgtagcgcatcacttccagtacgcgcaaccccgctcggtgcactgcatcggttaacgccttccctttcagcaagccactgatgagctgagcacaaaacaggtcgccagtccctttcaggtcggtttttacccgactatgggaaatgacattcacgctgtcggcagtgaccaccacaacctgcatctcctgattttcttcattaccggaggcgctggtaaccaccacccattttaatgtgtcactaagcagactttttgcggcagcaatggcactgtcgagatcgcggcaatttttaccggtcaggatttccaactcaaagatattgggggtaattccctgcgccagcggcagtaaatattgtcgatacgcttcgggaaggtcaggtttgacataaattccgctatcaatatcgccaatcaccggatcgaccatgatcaataggtcaggatggtctttgcgtagcgcagtcagccactcggcaaggattttgatttggcttgccgttcccatatagcccgtggttacagcacgaagttggcgcagcgcatcacgctcctgaagcgcacgcaaatagccgctaaaccattcgtccggaatcgcaccaccgtagaaagtgtcataatgcggcgtattgctcagcaataccgtcggcacggcaaagacattcaggccgttctgtttgatagcaggcacggcaatgctgttgcccacgctgccgtaaaccacctggctctgcacggcgacgatatccgcctgcagtgccctactcttatcgttaaacaacaacaaactactcatttaattttttctccttgccgatgatcctcatcgtaatccaaccgaaactttacctgattctggcagtcaaatcggctatcacaaaacaaggataaggtaattcaatgaagaaaatcatttgtctggtcattacactactaatgacactccccgtttacgcgaagttaactgcccatgaagaagcccgcatcaacgccatgctggagggattagcacagaaaaaggatttgatatttgtgcgcaacggtgatgaacatacctgctatgaagcggtttctcatctgcgtctgaagctcggcaatacccgtaaccgcattgacactgccgagcagtttattgataaggttgctagcagcagtagcattactgggaagccgtatattgtgaagatccccggtaagagcgatgagaacgcacagccttttttacatgcgttaattgcgcagacggataaaacggtgcctgcggaaggaaattaatccgctttgggaaggcatttacaggaggtaacatgaaaaaacgctttatttatcacgatgaaaaaagcaataaattttggtggatagattacgaaggggatagtttagctgtcaactatggcaaggtaggtagtattggtaaattccagacaaaagagttcgataatgaagaacagtgtctgaaagaagccagtaaattgattgccgcaaaaatgaagaaaggctatcaagaagatccaaagtttaacttcatggatcgctactattttgatgatgaagaaattgggttacatgttaaaacgagtcacccaaacttccagtgccattttactgatccactttatatgtgttgctgggatgaagaatctccttttggcagcgatgaaggtgctgatgctctaaacgttcttgaaaatagcctccgtaaagagccggatctggactgtgctgatttccctcaaatgttaattgaaactatgtggggtatgaaatacatcgctatggacagtattcttgaagaggatgttcgtgcgcaattactagtcgatgaaatgagcactatccagagcaatatgattacctacgcaactgcattcggtcagattaaagtcatgggtaaaatctcccataaacttaaaaagatgggactcaatgcactagcgcgtcatcagcttaccgcaaaaattcttcaatggggtgacggtcaggacagtccaatacttcaaaaaatgattgatgaccttacggcgtttcctcacgaaaattaaatactgcatttgtcggcagcaacaactgttaaaaaagtgcgctttgtttatgccggatgcggcgtaaacgccttatccggcctacaaaatcgtgctaattcaatatattgcagaaaccttgtaggcctgataagcgtagcgcatcaggcagttttgcgtttgtcatcagtctccgatgctattaatccttaaatccccgccccctggctaaaatgctcttccccaaacaccccggtagaaaggtagcgatcgccacgatcgcagatgatcgccaccaccaccgcgtcagggttagcttttgccacccgcagtgctccggcaaccgcgccgccggagctgacgccacagaatattccttcccgcaccgccagttcgcgcatggtgttttccgcatcgcgctgatgaatatccagcacctcatccaccagagaagcgttgaaaatccccggcagatattccgtaggccagcggcgaatgccgggaatgctgctgccctcttccggttgcaggccgacaatggtcaccggtttggattgttcgcgcataaagcgactgacgccggtgatagtgccggtcgtccccatgctggagacaaaatgagtgatgcgcccgccggtttgctgccagatttccggcccagtggtggtgtaatgcgcataagggttatcgggattattgaactgatcgagcagctttccttcgccacgattcgccatctccagcgccagatcgcgcgcaccttccatgccctgctctttggtgacaagaatcagttccgcaccataagcacgcatcgccgcacggcgttcctggctcatgttgtcgggcatcagcaatttcatgcgatagcctttcagcgcggcaatcattgccagcgcaatgccggtgttaccactggtggcttcgattaagacatcacccggtttaatttccccgcgcttttccgcctcgacgatcatgctaagtgccgcacgatctttcacgctacctgccgggttattgccttccagttttaaccacacttcactgccgttatccggccccattcgctgcaacttcaccagaggcgtattgcctattgtttgttctaatgtactcacgatctctatccatacgtggtgttgcctgatgcgacgcttgcgcgtcttatcaggtctacaggttacaaaccttgccattaaaaagcccggatcgcgggaagcgcctccgggcgtttaacattcactcaacctatcaggcgctttgtgcgagagcaagttcctcatcgcgggtttcgatacgctcgtcgccgttatacagccgcgcatgttgcagaccaacgaataaacgctcgccacgctgcggggcatcgtcgccatgcatcacgaccgtcagcggttcgttgtaccaccccagcggctgcaccactaattgggtgtagtgacctttcgggctggcttccagtacctgtaccggcagcgggctatcgaggctggtacggcggctgatatccacttcccaagggcgcaggaagagatccaccggcccctgatacgcaggtgtgtagcccagcggccagcgatgcgcgccaacatggaactgcccgccgcgaatggttccctgcaggcggttcacttcgcccataaattcgagcacaaaacgggtcgccggttcgcgccatacctgatccggcgcgtcagcctgttcaatattgccctggctcatcacaactacacgatcagctacttcggtcgcttcttcctgatcgtgggtcacaaaaacgctggtgaattttagttcttcatggagttgacgcagccagcgacgcagctctttacgcacctgcgcatccagcgcgccaaacggttcatcaagcagcagaatttgcggttccacagccagcgcgcgcgccagcgccacgcgctgtttctggccgccggaaagctgcgccggataacgatccgccagatgggcaagctggaccatttccagcaattttgtcactttcgctttgatggctgcggcattcgggcgctcgcgacgcggcagcaccgtcaggccaaaagcgatattgtcgaacaccgtcatatggcggaacagcgcgtaatgctggaacacgaaaccgactttacgatcacgtgcgtgcaggcggctcacgtcggtgccgtggaagcgaatatgcccgctggtttgatgctccagcccggcgataatgcgcagcagcgtggttttcccggaaccggacggccccagcaacgcgaccatctgaccactaggaatatccagactgatatcgttcagcacctgggtgcgaccaaagctcttcttaatattggcaatctcaatgctcatgatgttcctcctgctgtgcgcgtttttcctgattctccaggcgccactgcaacatactttttaaaaacagggtgataatcgccatcagcgttaacagcgccgcagcggtaaaggagccgacggtgttgtagtcctgctccagcaattcaatctgtaacggcaggctcagggtttcgccgcgaatgctgccggaaaccacgctcaccgcgccaaactcgccaattgcgcgggcgttggtcaacaccacgccataaagcagcgcccagcggatgttcggtaatgtgacgcgacggaacatctgccagccggacgcgccaagcaaaatcgccgcttcgtcttcctggctgccctggcttaacatcaccggcaccagttcgcgcaccacaaacggacacgtcacgaagatggtgaccagcaccattcccggccaggagaacataatttgcaggttatgctcgtcgagccaaccgccgagcgggccgttagagccgtagaacagcaaatacaccagaccggcaaccaccgggcttacggcaaacggaatgtccagtagcgtcagcagtaactggcgtccagggaagttaaagcgcgtcaccagccaggccagcagaatgccgaacaccaggtttaccggtacggcaatcagcgcgatcatcaccgtcagccagatggcgtgcagcatgtccggatcggccagattctgtaaaaccggcatcagccccttgctgaatgcctgcacgaagatgtaaatcatcggcaccagcaggatgaacgcgctaaccagcatcccgatgccaatcagaaaccatttgccccagttaatcgggcgcgcgtcataacgcttcaattgggtaacttccgccattaatgacctaccacacgccgaccaaagcgactttgcagagtgttaatactgaacagcagcagcagagatgccgcgaggatcacgctagcaatcgcgctcgctgccgggtaatcaaactcctgtaagcgcacaaaaatcatcaggctcgtcacttccgtcttccacgcgatatttccggcgataaaaatcaccgcgccaaattcaccaagactacgggtaaagctcagcgccacgcccgccaccagcgccggagaaagctccggcagcaccactttgcagaaactctgccagcgcgttgcaccaagcgtttccgccgcttcttcatattccgggcctaactcttccagcaccggctgcacggtacgcaccacaaacggaatgctggtaaaggccatagccaccgcaatccccagccatgtataggtgactttgatatcaaacttcgccagccattcaccgtaaaaaccgtttacggaaaagaggctggccagcgttaaaccggcgacagccgttggcagcgcaaagggtaaatccatcagcgcatcaagcagcgtgcggcctgggaagcgatagcgggttaggatccacgccatcagcagaccgaaaacgccgttaaaaatgcttgccacaaacgcgctcagcagcgttactttgtaggccgcgaccacctgcgggttggtgatcacctcccagtactgcgcccagctcatctgggccagttgcatcaccagcgcggagagcggcagcagcaaaatcaggcacacaaacagcagactggtgccgaggcttaaggtaaagcccggcagcacgcgtctggaggagacagcaaacatcagttacgccccgccgctaacagcttgtctaactcgccgccgctggtgaagtgggttttcatcacttccggccaggagccaaatttgtcttccacgcggaacagctcggtctgcgggaatttgtctttcagtttgtccatcacctccgggttattcacgcggtagtaatagtcggtgatgatggtttgcgcctgcgggctatagagccagttcagataggctttggcggctttttccgtaccgttggcctgcacgtttttatcaacccacgccaccgggaattccgccagaatgttggttttcggaatcaccacttcaaagccctgcgcttcatactgtttacggatgttgttcacttcgctttcgaagctaatcagcacatcgcccaggccgcgctcggcaaaagtggtggtcgcgccacgaccgccagtatcgaacacttcaacgtttttcaggaactgggtcataaactgttcggttttgcctttgtcaccaccgtcagctttatccgctgcgccccatgccgccagataggtataacgcgcgttaccgctcgttttcgggttcgggaaaatcagcttcacgtcggagcgcaccaggtcgttccaatcgtggatattcttcgggttacccttacgcaccaggaagcccatggtggagtagaacgggctgctattattcggcaggcggctctgccagtcggccgggatcagcttgcctttatcgtgcaggatttgtacgtcggtcacctggttataagtgacaacgtcggcttttaagccctgtaaaatcgccagcgcctgtttactactcccggcatgagattgttttatcgtcagtttgtcgccgccgttatcttttgcccattgttgctcaaacggcggattcagggcggcaaacagctcgcgggagacgtcataagaactgttcagcagttccgttgcctgtacatggcccgccagcagcagagaagcgaccagcgcgagactgttctttttcagtaagttaacggccattgcgcacccttataaatttaatgactttctaatagccatcatatttataacggacgtgaaaggagtaacggttttatataccgtttggtgatttggaagttgaaaagggaataagaacttggttcaacaggcgtaattgttgcagtcagtttggacacgaacagcgcggagaaaccggagcgtacacatagtacgtgaggatttcgagcactgcccggggccaaaatgacaaataaaatagcctggtgaacttagttcaagacgaaatcctccccacaaatgcagggaggaaacagaggtgaatcagataccgacgctaaccgtctccggcagtgtgctgccgccatcaatcacattctgtgtaccggttaaatagctggattcatcgcttgcgaggaaggccgccagttcgccgacttccagcggatcggcgaggcgacgcatcgggattgctttcgccatttcagtcagcacgctctctggatcttccgggttgctctggcgggcaatgctttccgccattggtgtgcgcacgtatcccgggcaaatggcgttaacgcgaataccagactgcgcgtactccaccgccaggctttttgtcaggccaacaatcgccgctttcgttaaggcgtacgccgtttcgccaggatcggccaccatatcaccagtgacactagacatcatcacaatgcgaccatctttgcgggcaatcatctccggcagcaccgccttcgtgacgttccatacgcctttaatattgatgtcaatatggaaatcgcgatcgtcatcgctcatatcgaggaaactgcccagacgacaaacgcctgcgttattcaccaggatatcaatgcgcccttctttttccttcgcgcgtttgatagctgcggctacgctcgccgggtcacgcacatcggcgacaaccgccgtacagcgatgaccacgaccacacagttcgtccgccagcttttcgatctcaggggagatatccagcaagattaggttcgcgccatgacgtgcaaaagttctggcaattccttcgccaattccctgcaatgcgcccgtaatcagtgctgtcttgcccgtgagtttacccattttaatgctctccttgttaatacagagcgttacactccattccctctgaaaatacaggataaacaaaatattgctgcggatcagctcactaattcaggaaaatctcaatccagtcgctgctttatgcatcatttcaggcgttgtgttagctcactgctgcgctgaatcattttcaaactctccacatcattgagttgcacaaggccaacaaacagtaaatcggtaacagaattttgcgccgtgcgggtagacatgctgctgctacgccattcggtttctccggaaacggtatcgagggtgaaatgcgccagccgccgcagcggagagtcagtcagagaagtaatggcaatcaccgttgccccctgctttcgtgccgcttctgcgcacaagacaatctcttttttactgccgctgtaagagatagcgatttgtacatcgccttttttcaacgcctgagaaacggtggcttgtacgtgcgtgtcggcttcgcaggccacgcgatagccaattttcatcagtttgaagctcagatcgcgccccaccagcgcgcttccgcccaggcccgttatctggataaacggtgctttactgatgacctcaatgattttttgcagccgcgcgtaatcgagcaacgcgcaggtttgctccagcgccagctctttttcgcgattcagtttgcgcgcgatcacttccaggctatcatcactggtaatgctactgtgcaggtgcagtgccgtggcattcgttttctcccggctggcactgtattcgcctattaacgccatacgcaattcagtaaatccttgcgcgccgagtttttgggcaaatttcactatgctgctctggctaatgccgagctgtttcgccatctgccgactagaaacggattgcagctcactcacgttggcctgcagaaagtcagcgattttttgctcgttttcggtgaattcactccccgcattgcttattttcgtcaggtacaacatcttccactctcctgggctggcagcataaattccgcttaagttcttatgacgctcttcacactctgcgagtgtagactcaatgattcctttaagcctgtcaattcgggatatatgattccatacatctgcaattatttgatcgtaaatagtaaggtcaccaccgatgcaatttgaaaagatgattactgaaggcagcaacaccgccagcgctgaaattgaccgcgtaagcacgctggaaatgtgccggattatcaacgatgaagataaaaccgtaccgcttgccgttgagcgcgtactgccggatatcgccgcggcgatcgatgttatccacgcccaggtaagcggcggcgggcgtctgatttacctcggtgcgggaacatccggtcgtctggggattctggatgccagcgaatgtccgcccacctacggcgtgaaaccgggtctggtggttggtttgattgctggcggcgaatatgccattcagcacgcggtggaaggcgcggaagatagccgggaaggcggtgttaatgatctgaaaaatattaatttaacggcacaggatgtggtggttggcattgctgccagcggtcgcacgccgtatgtgattgccggactggaatacgcacgccagctcggctgccgcacagtgggaatttcctgtaatccggggagcgccgttagtaccaccgctgagtttgccattacaccgattgtaggtgccgaagttgttaccggttctagccggatgaaagcaggtacagcgcagaaactggtgctcaatatgctttccaccgggctgatgattaaatccggcaaagtgttcggcaacctgatggtcgatgtggtcgccaccaacgaaaaactgcatgtgcgacaggtcaatattgttaaaaacgccaccggatgtagcgcagagcaagcggaagcggcgttaattgcttgcgagcgcaactgtaaaacggccattgtgatggtgctgaaaaatctcgatgccgcagaagctaaaaaacgcctggatcaacacggcggctttattcgtcaggttttagacaaggaataacccatggccaaagagatcagcagtgaacttctgaacaccattcttacccgtgtcggcggaccgggaaatatcgccagttgtggtaactgtatgacgcgcctgcgtctgggtgtacatgacagtagtctggttgatcccaatatcaaaacgctggaaggcgtgaagggcgtcattttgaccagcgaccaggtgcaggtcgtttttgggcctggtaaagcgcatcgtgccgcaaaagcgatgagcgagctgctgggagaagcaccggtacaggatgccgcagaaatcgccgcccagaacaaacgtcagttaaaagccaaacaaacctccggcgtgcaacaatttctcgccaaattcgccaccatcttcacgccgctgatccccggttttattgccgccggtctgctgctggggatagcgacgttaattgccacggtgatgcacgttccggcagatgctcagggaacactacccgatgcgctgaattttatgaaggtgttcagcaaaggtttgttcactttcctggtgattctggtgggctataacgccgcccaggcatttggcggcacgggcgtaaatggcgcaattatcgccgcgctctttttgctcggttataaccccgcagcgaccaccggttactacgccggttttcacgatttctttggtctgcccatcgatccgcgcggcaatattatcggcgtgctgattgccgcgtgggcctgcgcccgcattgaaggcatggtgcgccgctttatgccggacgatctcgacatgctgctgaccagcttaatcaccctgctgatcaccgctacgcttgcgtacctgatcattatgccgctgggtggctggttattcgaaggtatgagttggctgtttatgcacctgaacagtaatccgttcggttgtgcggttttagccgggctgttcctgatcgccgtggtatttggcgtgcatcagggctttattcctgtttacctcgcgttaatggacagccagggattcaacagcttatttcccatccttagtatggcaggcgcgggccaggtgggcgcggcgctggcactctactggcgggcgcaaccgcacagtgcgctacgcagtcaggtacgcggggcgattattcccggcctgctgggcgttggtgaaccgctgatttacggtgtcaccctgccccgcatgaagccgtttgttaccgcctgtttaggcggcgcggcgggcggtttgtttatcggcctgatagcctggtggggtctgccgatgggcttaaacagcgcctttgggccgtctggtctggtagcgctgccgctgatgacttccgcacaaggcatccttccggccatggcggtttatgctggcgggattctggtggcatgggtttgcgggtttattttcaccacgctctttggctgccgtaacgtcaatctggactgatatcatgaaacggacaatgctctatctttctctgctggctgttagttgtagcgtcagcgccgcaaaataccctgttctgacagaaagcagcccagagaaagcagggtttaacgtcgaacggcttaaccagatggatcgctggattagccagcaagttgatgtcggttatcccagcgtaaacctgctgatcattaaagataatcagattgtgtatcgcaaagcctggggagcggcgaaaaagtacgatggcagcgtgttgatggaacagcctgtcaaagccaccaccgggacgctgtatgacctggccagtaacaccaaaatgtacgccacgaacttcgccctgcaaaagctgatgagcgaaggcaaactgcatcctgacgatcggattgcgaaatatattccggggtttgccgatagtccaaatgacaccattaaaggcaaaaacaccctgcggatttctgacctgctgcatcacagcggcggtttcccggcagatccgcaatacccgaataaagcggtcgcgggcgcgttatattcccaggataaaggccagacgctggagatgatcaagcgcacgccgctggaatatcagcccggcagcaaacatatctacagcgatgtcgattatatgctgcttggatttatcgtcgagagcgttaccggtcagccgcttgaccgctatgttgaagagagcatttatcgcccgctcggcctgacacatacggtatttaacccgctgctgaaaggctttaaaccgcaacaaattgccgccacggaattgaacggcaatacccgcgatggcgtgatccatttcccgaatatccgcacctccactctctggggtcaggtgcacgatgaaaaagccttttatagcatgggcggcgtttccgggcacgcaggtttgttttccaataccggcgatattgcggtgttaatgcaaacgatgctgaacggcgggggctatggtgatgtgcagctgttcaatgcggaaacggtgaagatgttcaccaccagctctaaggaagatgccacttttggcctcggctggcgcgtgaatggtaatgccaccatgacgccgacgtttggcacgctggcaagcccgcaaacctacggtcacactggctggaccggaacggtgaccgttatcgatccggtgaatcatatgacgattgtgatgttaagcaacaagccacatagcccggttgccgatccgcaaaagaatcccaatatgttcgaaagcggtcagttgccgattgcaacttatggttgggtagttgatcaggtgtatgcggcgttaaagcagaagtaataaaaaggccagtcagtaatgttactggctggtctgagagtgctgacaaacgcaaaactgcctgatgcgctacgcttatcaggcctacgtggagcccacaatatattgaattagcacgatttcgtaggccggataaggcgttcacgccgcatccggcgtgtacaacgcgcacttggtcaacaatctgaggccagtcagtaatgttactgcctggcctttaatcaatgaatcagaaacgcttacagcgccatcaacttgtccaggctcggtgcgaaataatagccgccggttaccggtttggtgaaacgcaacatcgcatcacgcttaccatcggtatcgccaaacatgctcagcagttgctgctcaatgttatgcagacgcgcgcagtaggcgcagaagtacagaccgtgagtgccactggcagtgccgtacggcaggctctggcgaacaatcttcagccctttgccatcttctttcagatcaacgcgggtgaggtgagaggtttccggacgttcgtcgccgtcgatctcttcgttggcctctttggtgcgcccgatcaccatctcctgatcgtgaacgctcatccggttgagctgcttcaggttgtgttcccaacgctggacaaacacatagctgccgcccgcatccacgccgtctttgataaccgccacttcgcgacgcgtctcttcacccgccgggttttccgtaccgtcaacaaagccgctcaggtcacgctcttcaacccaacggaagccgtggatctcttctttcacttcaatgcagtcaccaaaggcttccatcgccgcctgggcgacagagaagtttacgtcgtgacgcagagaaagaatgtggatcaacacatcgaactgggtcgtcggcgcaaggcctttaccgtagcccggaaaatctttcagctcttctgccccaacgccgccgctcagagcgcgccaggtgttgttaccaaaggcaaccaccgcaccaagatgcgcgtccgggaatttcgcttcaaaagttgccagtttgtcggcaaatgttttactggccgcacgcagggcgtcaacttcccctttcacgttggcttcgatccaaatcgccgcgcggcaatgttctggcaaaatgccactctgaacctgagacattgttcctcctgaaaataataatgccacgcaatccgtggcattgttgagcgctattttacgtgttttttcgcggcggcggtttgttcagacgcaaattaacgccgccagataattttactgactttccagtttttcagggtatcgtcgctaggcattaacccttcaggaccacgccattccccgctgaactggtagctaatatgttgactgccttcggctttacattcgacggcacgattatcatcaccatcagctttttggcaattgccaaatgctttgctgtaaaggtcgctaaacggtgtaccgattttaacaccggtgtcagcaggaatatcgctatccagcacgtcaatgcgactgatcgtgccttgatcgccgttaatcaccatcgccacgttgtcgcccttcatcacttcaaaaaagcgcaccacgttgccgttcgcggttttcattccgctgcgcaggcgataatcgccatcaagcgcatcggcaatggcttgttcttgcagtggtgtggacgccgttaattcacccacgccctgctcgctcactttggtggagctcccaaaccagttccacgggttagcggcagaccagttaacactgctcatcgtggaacagccggtcagcatcaatggcatagcgcataacattaaacgcaggcttttcatgtcacttcctttggttattcaataacgttgcttggagtgcaaattcaccaaaaagtgccgttattcttttacttcataaaaacaagcgcgtaaacgtcgattggtcagcagccagattaacgccacaatatccgccactaccagcgccagaccgataccgctaacggattcaccgttcagccacagccacggttgccagcaaagtaaaaccacctgcgccaacagcaacagaaaatagagtacacgccaggtgcgaggaaacgtagcccgccgaccgctcaacaaaaacgccagcaccgccggaatgccaggaatcagccccagccagaaattatcgtgatcgggataaaacagatttagcagcgcagtaccctgctcgcggctcgcaccggcaatgacaaacagcacccaggttcgcgcctgaagcaatagcacaagccagaagagcaagggtaaacgcaggcgaccgtgcgcatcataatggacaggatgaaactcagtactcttcatcttcaatcaaacgcttacccagactcagcacgtcggcgtgttcatatcccaggcgttcatacattccgagcaccatgtcgttatcttccggcacattgatctgaattttcgggcagccacgagcaatcagctttttctccagccgattaagcaacgcattggcaatcccacgcccacgaaactctggatgcacgccaagataataagcagacccgcgatgcccgtcataaccgcccatcaccgttccgaccacgtcaccgtttacctcagcgaccaaaaacaaactgacgtcatggttcatcttacgctcgatgtccatttccggatcgttccacggacgcagcaagtcgcaacgctcccaaagggtgatgacctcttcgaaatcttcctggcgaaatacgcgtatctccatggtattcgttacctttttgcgggttaaaaggctgattatggcgtgaacggtcgaattagccaatatctgacgaaaatcggttgaaaaagtggcataatggggagttgtcaactattgaaatgaaaagtaaaacaattctcaacagcaaaccgtcgtaacggattacgcgatacgatataacatctggaactttattattacaactcaggccgtatgagcacttttaaaccactaaaaacactcactagccgccgccaggtgctgaaagccggtttggctgccctgacgttgagtggaatgagccaagccatcgccaaagacgaacttttaaaaaccagcaacggacacagcaagccgaaagccaaaaaatctggcggcaaacgtgtcgttgttctcgatccaggtcacggcggaattgataccggagcgatcggacgcaacggtagcaaagaaaaacatgtggtgctggcgattgctaaaaacgtccgttccattttgcgtaatcatgggattgatgcgcgtttaacgcgttctggcgatacgtttatcccactttacgatcgcgttgaaatcgcccataaacatggcgcagatctgtttatgagtattcatgccgatggctttaccaacccgaaagctgccggtgctagcgtatttgccctctctaaccgtggggcaagtagcgcaatggcgaaatacctgtctgaacgcgaaaaccgcgccgatgaagttgccggtaaaaaggcgactgacaaggatcacctattgcaacaagtgctgtttgatctggtgcaaacagataccattaaaaatagtctgacgctcggcagccatattctgaagaagattaagccggtgcataaactgcacagccgcaacaccgaacaagcggcatttgtggtgttgaaaagtccgagcgttcctagcgtgctggtggaaaccagctttatcaccaacccggaagaagaacggctgttaggcacggcggcgtttcgtcagaaaatcgccacagcgattgctgaaggcgtgatcagttatttccactggttcgacaaccagaaagcacatagcaaaaagcgataagttatgaaacccgacgcacaccaggttaaacagtttctgctcaaccttcaggatacgatttgtcagcagctgaccgccgtcgatggcgcagaatttgtcgaagatagttggcagcgcgaagctggcggcggcgggcgtagtcgggtgttgcgtaatggtggtgttttcgaacaggcaggcgtcaactttagccatgtccacggtgaggcgatgcctgcttccgccaccgctcatcgcccggaacttgccgggcgcagtttcgaggcgatgggcgttagtctggtagtgcatccgcataacccgtatgttcccaccagccacgcgaatgtgcggttttttattgccgaaaaaccgggtgccgatcccgtctggtggtttggcggtggcttcgacttaaccccattctatggttttgaagaagatgctattcactggcatcgcaccgcccgtgacctgtgcctgccatttggcgaagacgtttatccccgttacaaaaagtggtgcgacgaatacttctacctcaaacatcgcaacgaacagcgcggtattggcgggctgttctttgatgacctgaacacgccagatttcgaccgctgttttgcctttatgcaggcggtaggcaaaggctacaccgacgcttatttaccaattgtcgagcgacggaaagcgatggcctacggcgagcgcgagcgcaatttccagttatatcgtcgcggtcgttatgtcgagttcaatctggtctgggatcgcggcacgctgtttggcctgcaaactggcgggcgcaccgagtctatcctgatgagtatgccgccactggtacgctgggaatatgattatcagccaaaagatggcagcccagaagcggcgttaagtgagtttattaaggtcagggattgggtgtaactccctcacccccactcccgcatccgctgatgcagcgtcagactcggcttctcggaaaacagctgctggtaatccgtggcaaattgccccagatgccagaatccccactgcatggcggcgtcttttaccgtcatactttggctccacggacttatcagttcgcggcgtacggcgttcaggcgaatgcgtttcagccacgcgttcgggccaatgcctaaaatagcgtgaaacgcgttttgtagcgtgcggcggctgacatgcagttgattacacaaatccagcaccgtcaccggttcggacatgttttccagcacatattcacgggcgcgggaaagcaatcgacggtaactctgatgactgatgctttccgccgtcaccattggttgcgcttcttccagcatggcccccatcgccattagcaaattatcccccagcacttttcgcactgcaggctgatggagattttccggattctcgcaaaacgtcgccagcgcctgttggacaaagccccacagcgcggctttatgctgctctttcacttccagcgcgctctggttacgcaacatatgtaatacccgatccgggttatgcaaaaagttagcctgccgggtgatgacatcttcagaaagcaccacgcccaggatcgtgtaatcatccggcgtgctcagttcaaattcagtgccaccagggcgggtggcgatttccgcgcttcccagacattggctaccgataaatccctgctcaccgcgcgtcgccggaatgccaaaccagaagctgttcggccagaccaggcagctctgacgcagcgccagaccggtgtattcacgaaaaacctgaatatcatcgagtagaatttccgtaaattcaccatgaaacttgcccggatgcagctgatcgtaaatctgctgccaggcggtaatcgttaaagcatgttcatagacatccgttgtctgtcgttgatgaacattatccacttcgaccttcggcgtgagcttcaggttttcgggtaagggttcatgataaagatggtgcaaattggctgtacgggtctttttcatgatgttaatgccgggtgttgtaggacacccggcacctccgacaggttaatggggcttgagacgataacgactactgcgtttacgtaacgtcccggcagaaaagagctgttcgagcgcatttctggctttttccagcggccagccaaagtgggcagccacttctcctgccgtcattccctgacgtacacttgttaacagcgccaacaactcgtcagcagattccgcgacgataactggcgcgtcgggttcccttacgggttgcttcggctggcggttaaagccagtaaccagccactgggtgtcatcgtctggccgaccgatctccttgcggctgatgacacgcccggtacgcatcgcggcagcacaacctgcgtccagcgccgcacgacacgccgccagatcgccttccaccaccagcgttaagcgaccagggtcaagcacttcgtgactgagcagacgaacgttagctgctttgagcatggcatccgctgcatctatcgcggcgaccatgccgtccacttccagcaatcccagtgcattgatcatcggcaacctccgttacgcacgctggattggattacgcgcgatttccagcactgcatcggtaaaggcgttacaggctgctttacacgctgcctggctaccggttaaaaatgctgcgctgtagttggtttcagacggtggcgggacataggtcgccagctgtacgtcggcagacttcagggctgcatcaatgccataggtcgcttccagcggcggtgccaccagatacgccatcggatcgccaagcgtgatcccggcggtactactgagataagaaccggtacggctaactacatgtgccaggaatgccgtatcttgcgcgtcattagcccactggaaagctgcgccattttcaatatgcgcaatcatcgcatccagacctgcacgcacttccgccgggtttggcccaccaagcataatcagcacttcaccggcagtcggactcgggccgtgtgcagcgcccgcatataggctgcggccatacaccacttccaccatcgcctgcttggtcgcttcatcagcggcaatgtaggtgacgtcatcggagtcggcagaaatcagaccgaggctacgaatatgcggcggcaatttcagttcacgcgcaaaatcggcgttaacggaggcaatcacccgcatagcggtgacagacggtcgaatcaaatctaaagctggcatgatgcctccttatcgggtcatgttgatgccggatgctttctgctccagcatacgtttcgccaaatccacaatgacggctgcggcttcaaccggcggcgtgccgccctggtgaatgttagagatacaggtgcgatcggcctcaacggtggtcgccatacgcgggctgtaaacggcgtagcaggagaggctttcactctgacccaaccccggacgttcgcccaccagcaggatcactactttcgcgccgaggatctcaccgatctgatcttcaatcttcacgcgaccataacgaacaaagaatggtgtaccgactttcagcccggcctgtttcaggcccgccatcagcggtggcaggatctcttcgtagttcacggtgatcgcatcagtactcaggccatcagaaataacgacctgtacgtccggattggcaacacactgcgctttcagcgcttcaacagcttctgcacacaggcggcggcccatatccgggcgagtcaggtagagatttttgtcgctaatttcagagcgtacttccagcaagccctgcgctttcacccactcttccggcacttctttcagtacggtatctttgctacgagagtgatcggccaggaaacgcagcagcgcctgcgtacgtggacgcggaccggcacgaccggtacaaacgcgggccacggtgctgcggcgcagttctgttaatacgtctgcgcgatgcggattttcaacaccaatccacgcttttgcttcagcggaacctaaatccagcgcacagctttcgctggtcaccggtgccgcacagttggtggtggcgcactttgcttcactcggcgcgggggccgcttgtcccatactcgccatcacgctgcgtacaatttcttcaatctgtttttgatccatgatatgttatctccgcgtcatcagaagaacagactcggatcgcccgcccgtttggtcaggcgaccgtttgccataatgcccatgctttccagccagcgttcaaactccggactcgggcgcaggttgagtaactgacgcacagtggcggtatcgtggaatgcggtggtctggtagttgagcatgatgtcatcacccagcggcatccccatgatgtagttgcagcctgcggtggcgagcaggatcatcaggttttcgttgaggttctggtcagcgtcagcgtggttggtataacagcagtcacagcccatagagatgccgctcagcttgcccataaagtgatcttctaagccagcacggataatctggcggtcgttgtagagatactccggcccaataaagccgaccacggtgttgacgataaacggatcgtaatgacgcgccagcccgtagttacgtgcttccatcgttacctggtctgcgccgaagttagcgccagcggatagcgcagagccttgtccggtttcgaagtagaggcagttttccccggcgatacggttgaactccgcgcccactgcgcgcgcttcgtcgagcatcgccagctccacgccaaactctttcagccctttttcgctgccacagatactctggaaaatcagcccgcccggtgcgccacgacggatcgcttcgatctgggtggtgacgtgcgccagtacacagccctgagttgggatgttgaatttgtcgatcacgccatagatggtatccaacacgcggcttaagttttccacgtcgtcagtcaccgggttaacgccgatcaccgcatcgcccaccccgaaggaaagcccttcgtagatttgcgcggcgatactttgcacgtcgtcacgggtgtcatttggctgcaaacgggcgctaaaggtgcccggaataccgatggtggtattggcctttttgattaccggcattttcttcgcgccgtagatcaggtccgcgttggagcaaatcttcgctaccgccgcgaccacttcgctggtcagccctttgcgggtaaaggcaatgtcgtccacgctggtttcatcgctcagcacatactcacgcagttcgctgatgctccagtttttaatctggttgtaggccgtttcgttaacatcgtcctgaatcagccgcgtcacgcagtcatcttcataggcaatcaccggattattgcggatgtccgctacggtcatttcgctcaacacctgctttgccgccacgcgctcctgactgcttgccgctgcgacgcccgccagcacatccccgctacgcagttcgttggctttagccagcacctcttttacatccttaaactgatatacattgccgaacaatgtggtctttagtttcataagtcgttccctcaggaaggaaatgcgagacttttcaccgtcaccggcacaacgcttccgccaaaaagaggcgtaccaatgtcgatatagtcccccgcgcggacaatcacttcgtcaatgactgccaacgggagttgttgtagctgtgggcgcaacaacatgcccagagctttaccaaagtcctgcccggccaccaccagcaggggatgcggattcggaaaacgcgcgacgaaatcgaccaacgcgttgatgaccgtcagtaccgcggcgtaacgcacaggcaggctggcgggaagcgccagcacgtacgcgtcagttttgggatcaagatccagctgaatcagcgcctgttgccaggcccccaccagatccgtttcatcaatcgggatcgccaccggcaaattgcgcagcggcagttgtacgccctcaagccagattgtgctgccagagaggctaagggtatgcgcgcccgcgccaatcaccgtggcgcgcacggtttgcgccggaaactgtacgttcatctcacgcaggcgcggatggtcatgcagcgcagttgccagcagcgggccaatatcggcaaaacagaacgggtcggcgggctggtggcgataacattcgcccacgccgccagaaagcgtaatgatttcgggcgtaacacctgcgggcagcaaaccggtttgcatcaatgcctgcgcgagcggactgagcgttccgtcaatcacttcgacaatcagttctgccatccgccgggtcacctgcaccagctgcgcgccggtcaggctacgggcgtcggtgcctgcaccgaagcactcatccacaatcatctgccccggtttatgagcgtaaaccacgcgcccgtggctgtcggtttccagcaggcgaccaccgacgttgaggcaggcagtgccgctgatttttccggcatcgaacagggcgtagttcgcggtgccaccgccgatgtcgatattcagtacccgacacagccgttgttcagaaagggtttgtgccccggctccgtgaccggcgatcacggattcgaggtgcggcccggcgctggcaacgacaaaatcgcccaggctctgagagagcgccatcaccgccgggcgagcattgcgggttttcgcgctttcaccggtgatgatgatggcaccagaatcaacgctttccggctcaatacccgcagcatgatattgctcgagtattaaggttttcagttccgcttcttttaaaccgccctgtttatcgacaggggtaaagaacaccggactttgccagctaatttcgcgtttaatgaattcgtagcgcggcacctggctcaccgccgcacggttaaccagctccagccgggagaaaatcacctgggtggtggtggtgccgatatcgataccgacgctcaatagctggcgagtgttcacgattgtgcctccgcttcggtttaagtcagctttgtgcctccgcttcggttttagtcgcggtcgcgtcttcttttggcaccagcatcatcgccacgccaatcgccgttacgccgccgatcaacttgccgacaatcatcgggaagatcatggcgttcatgttggcagcggcgaagcctaagtggtcgcccagggcgaaagcagcggaaacggcgaaggcgcagttgatgactttgccgcgggtatccatctgcttcatcatgccgaacatcgggatgttgttggcaagcgttgccaccatgccggctgccgcgatgttgttcatattcagtactttaccgacgctcatcagcggtttttcaaaccagcgagtcagcagcagcaccatcggatacgcccctaacagaacgcaggagatagaaccgataacttcaatggcgcgcatcacctcaccgggtttatcgccaggggccataaagataggatccagaccggggatcagttcccagccaagcaggaatttcactaccgcagcggcaagaccgagggtgatcaatgcaacgaggaatttggcgaagatctggaagccgttgatcattttttccgggatgaatttcagccccagcgccaccagaatcgcaacaatgatcaccgggatcatgttcatcaggatcagggcgaaagtgaattccaccggctggccgttgatctgcacaccggagtacatagcaaccagaccaccagcgatacaaccaatcggaatggtcacaatgcccgccagcacgccgagcgccagataacgacggtcagaaggttcgataatgccgagcgccaccggaatggaaaacacaatcgttggccccatcatgctcccgagaattaacccagagtatagccacgcggctacgtcgccgcccgccagctctttggcgaggaagaagccgcccatatcgcacgccagcagtgttccggcgaacatgcttgggttagcgccgagcatttcgtaaaccggaataattaccggcccgagaacgtgagccagtaccggtgccagcgcggtcataccgaccatcgccaggcccagtgcgcccattgccataaagccttcttcgaactgaccgccacttccttcgatacttttaccgaacttaccgaggaaacgagcagaaccgccgaactggctcaggatcctgtctacggcagctatcagcataaagaacatcatgatgtacatgatgatttcgttaattcccatcgcctttactccctgttagttgttatttattggcggatgcggcgtaaacgccttatccgccctacatgtgcaatcccgtaggctggataagacgcggcaagcgtcgcatccggcaattgcaccgcgccactggcggatgcggcgtgaacgccttatccgccctacatgtgcaatcccgtaggctggataagatgcggcaagcgtcgcatccggcatttattgcgccgctgcgtacaggccgacaatctgctccaggctggcggtacgcgggttactgcgcagacaaatatcttccagcgcggcctgcgcccatgcgccgtaatgcgcagatgtcgcaccaacatcgcccagtcgtttaccaatcccaacttccgcaatcagctcacttaccgcgttaatagcgtcacgatcgtcggattttttagttcgcagtgcccgaccaatctgactaaagcgttcacgacaaaccatccggttaaattccatcaccgttggcagcaacatggcgttcgcgagaccgtgcggaatatgcagcgccgcgcccggctgatgcgccatcgcgtggcacaacccaagacccgcactggaaaacgccattcccgccatacaactagccagcaacatgctctcgcgcgcggcaaggtcgtgaccgtagcccaccgctttcggcaggcttttgccaatcatcgcaatggcaccaatcgccagactgtcggtaaacggtgtagcgttcagggcgctgtatgcttcaatggcatgggttaacgcatcaatgccggtcatcgccgtgacatggctcggcacaccttcggtcaatgcggcgtcgaggatcgccacatccggcatcaggctggcatgggctaacacctgcttgcgcccgctcaccgcgtcgataatcaccgttacattggtggtttcagagccggttccggcggtagttggaatggcaatcagcggcaagcgcggttgcagaacgctggtttcactcatctctgccagcgtgctatccgggttcgtcaccagcaacgtcacggctttcgccgcatccagcacgctgccgccgccaaacgcgatcaccccatcacagccactctcacgcaactgcgccacggctgcacacacgtcggtaatgcacggttcgcccaccggacatggccagagcgtcatggcgatacctttaacggtcaggctacgcgtcagcccggcggtcatccctgcctgatgcaaaaagctgtctgccatcacgaacagatgtttcagcccacgcgtttgcgcttgctgtccgcaactgctcacgctgcccggaccgcaaagcgtcaccggtggaacgctaaatgtttttacccgttgcagattcagggtatcgaacgcctgaaagagcgcggtctgcaattcattttgcatatagcccctccgctttctctcgcccactactggcgatcgccagcggggtcataaacaaactgtgctgcggtaaatgcacctgtaacgccgggaattgtttgcgaaacagttccgccacgcccggttgcatacaagagccgcccgccagccataaatcagtaatgccctgcccttcaatatgccgggcgacaatgtccgccattttttcgtacaccggtttcaccgcaggccaaatctcttcaccgtgaccgcgcttgtactgctccgcctcttccaggctaatacggcgatttccggcgagagtcagagagatgtgatgtccgccggtggcttcatccgcgctgtacgtcaccttgccctttttcacgatggcaatgccggtagtgccgccgccgatatccactacaccggcgttgtccagttgcagcagatccgcaactgcggttggctcatccagcacatggctcacttccagtccggcagattccagcacgttgatggaaatacgcgggtccgtacctggaggaaaactagtcgccgcatggctaaaacgacgaccgaattgctgctcgagcgtgtcgagatggcgacgaacaatggtgacagcgccgaagaaatcccagacgatgccgtcgcgaaccacatcggcccagtcgaggcataccgccactggctgaccgtcgcggtcgacaaccatgctcaccacatcgcaggtgcccagatccacccccagccacagcggagattccgtcgcggcgggcgtctggttacacagcgttgccgccgtttgcagacgtggggtgagccattgttcgtcgtgcgccatctgttactccttaaacaatgcgaaacgcatcgactaatacacagcgacgcagacggacaaacgtacgcgcgctggttaccccttcaccggttggcgtggtgatggtcatggtggtccagccttccccgcccagccccagcccggcaatgcacggtccgttcttaacgaaaatgctggtatcaatagcattcgccatctggttcatgttttcgatgttgcggctgtgcattgccgccgtgtggtggcaaccgccttccagtttcaccgctagcgcaatggcatccgccacgttggcgacgcgcacgacgggcaacaccggcatcatcagttcagtcacggcaaacggatgttctgcggtggtttccacaaacagcaggcgcgtttcttgcggaactttaaggccgattgccgccgcgattttgcctgcgtcgcgaccaacccagtcacggctgacggtgccttttccgcgctcgtcgatatttttcagcaacaccggttgcagctgctgcgcctgttctgcggtcagtttcaccgcgtgctggccttccatcagacgcatcagttcatcggctacgctatcaacaacaatcagtaccttttcgtcggcacaaatgatgttgttatcgaaagaagcgcctttgacgatggactgagcggcacgggcgaggtcggcggtttcatccaccactaccggcgggttgccagcgcctgcggcaatcagacgtttattggtgtgtttacgcgccgcttctactaccgcttcgccgccggttaccaccagcaggccgatacccggaaacttgaacaagcgttgcgcggtttcgatatccggatttgccacagtaaccagtaagttttccggcccacctgcggcaacaatcgcctggttgagcagcgtaatcgcccgctgggagacttttttcgccgccggatgcggggcaaaaatgacgctgttgcccgcggcaatcaggctgatggcgttgttaattacggttgccgccgggttagtggaaggcgtcacgctagccaccacgccccagggtgcgttttcaattagggtcaggccgttgtcgccagtcagcacttgcggagagaggcactcaacgcctggtgtgccgcgcgcctgagcgacgttttttgcaaatttatcttcaacgcgccccatgccggtttcactgacggcaagttccgctaaatctctggcgtgtttttcgcctgcttcacgaatggcagcaatggctaactggcgcattgccacgctttttaacccttgctgggcgactttggctgccgcaacggcgtcatccagggacgcgaaaacgcccatctcatgaacggcggcggacggcgtgtcactgctttgcattttcagcagtaccgctttcaccacctgttcaatatcctgttgattcatgatgttctgccttatttgtggaaaattacctgaccgccagacaccacctcatcgacaatgccaatcacgcacagatcgaccggactcgtttcgcttttatgcgcctggcgggcggaactgccactcaccagtaacacccactccccggttcccgcgccaatattgtcgatggcgacggcgcattgcccgtcaggattaccttgtggatcaatcatttccaccatcagcaatttgtcatgcgccagtccgtgatggcgtacggtacaaacaatttgtccagtgacgactgccagtttcatacccgcctccgtggcgtatttcaggtaaaagctccccctaccctccgcagaaggtaaaatgaaaaaggagagagcgtgacgcccgaatcgacgtcacacagggtgattacaggttgctgctatcgcctttcaggccgatcgggaagacttcttccaggtcgccgtgcggacgcgggataacgtgtacagataccagctcgccgatacgctgtgccgctgcggcacctgcatcggtcgcggctttacaggctgcaacatcaccacgaaccatggcagtacacaggccgccgccaatctgcttaacaccaaccagcttgacgcgcgcagctttcaccatcgcgtcagaagcctcaatcagtgcaaccaggccccgggtttcgatcattcctaatgcttccattgtgctttcctctttatcagggtccagaacgggaccgttcattcaaccagtgtttgtaaactgctttcgcggttcacttctgtctgacgcggcacagctgccaccagcgccagctcgataatttcctgcacgctacaaccacgagagagatcgtgcatcggcgcggcaagtccttgtatcagtggcccgacggcacgatatccgccgagtcgttgtgcgattttgtaaccaatatttccggcttccaggctcggaaaaaccatcacattggccttgccctgtagcgggctggcaggcgctttttgcgccgccacttccggcacgaaggcggcgtcaaactgtaactcgccatccaccaccagctttggtgcgcgctcacggacgatttctgtcgcctgctggacgttagcaacacaggggtgacgggcgctaccattgctggaaaagctcagcatcgccacgcgcggctcttctccggtgatggcgcgccaggtttcggcactggcaagcgcgatatccgccagctgcgccgccgtcggctgtggcaccacgctgcaatcggcaaagcccaacgccgggccgctgtactgtggcaacatcaggaaaatggaagagagcgttttacagcctggctgcaagccgataatgcgtaatccggcacgcagcacatttgccgtggaagagaggttgcccgcgatacagacatccgctttaccggcgctgaccattgctgcggcgaacatcagagggtcggtaagtttttccagcgcatccggcggcgttttttcgcccgcgcgggccagccagcgatgagcaaattcttcccgcattgcgaggttgccatgcggatcaatcacctgtagcccgtccatcgccacgccgtgactgagcgcaaactgacgaagttcaaacggattggcgaccagaatgggcgttgccagaccttgttgatgtaaatattgcgcggctttcagcacacgttggtctaacgcatccggaaaaaccactctggcgggcgctcgcaacgccagttcacgacaacgttcaataatcattgcgtttcccccagtcgttgttggatctgcttcaccgttagcggctgcttcgttacgctcaggatcatcatcacgtagaccgtgctgctaaggcggttcagcgcctgcaaaatgtccgggcgtaatacttcaaagctgcgggtgataaagacctgcgccgctacggtttcggtttcccgcactttggtgcgtagcagattgagcaacgcagcatcgcgcccgtggctggcttccggcaccagatgatcgtggtcgagatagcgcagcggctgatgagaaagccgatgcagatcttcgtcagaaagcccgacaatcgcctggcagcccagcggttcccccagcgcatcggcgcgcataatgttgccaagacggctacggatatccgccagccacggctgccacggttccgccagttcaatttgcagccacactgccagcgcaatggtgctgtcgagaaccgcgcgaaaacccagacgcggatcgcttttggcgaccattttttccgcgctcaggtgagtcagcgtatccggcttttttgccaccggctggcgacacagttcgcagcacgcctgcggatgttcatcgctactggtcagcccatgaacgggctgcggctgctgctgttcatcgtcaacaaacaggcggccctgctcgtcaataaacttgatgcgcagatggcggctttccagcaactcccgggcagagggcgtcaggcgactgtccgcagggagatggatctctgcgccttcgctgagcgtatggttcgctcttagccatgcttcggtgatgaaatctttcatagggattgccagttagccggccaggcgacatacaggaatttcacgctggatgtcgtaccaaattcgatgctggagcctttcgggataaacatcacgtcgcctgctttggcgatcatggtttggccttcgtggcgaacatgcagctccccttccagcaccatgtcgatttcgtcgtagttcagggtccacgggaagaatgcgttctcccactgcataaaaccggcggccatgctgctgccgtcgtctccggtcacaagatcagtcaagcccacgcaatgcggctctgcgccgtcgaaacgaccaaacttgacgctactgccatcaatcactttgatgccgcctttgccggtcacgcttttgaagctcggctgcattgcgccctgctccaggctctgtttttccttcatcactttttccatcagctgtgcgaccaggctttcggtaaactggccttccggcagctgggcaatgatggtttcgcggatgcgctggctttcggttttgtcggctggcacgctggcgggcacggacgccgttaccgggatgctttcatcacattcggtgatggtaaaacccagtagatccgccacttcacgggcttccggggtaataatgctggcgcgcagaaccacggacattgcctgttcgccgcgcgcgtgtgcttcacgaatatcattcgctgtgatgagttttttcacctgcttcctcctgtttggtgagagatgccagataatccaccagttgctgcacgctttgcgggtcgtggctgtttagctcgaacatcggctcttcgaaacccgtctcaagcaataactttcgcgttgcggcgacgtcagcatctggcatgtccgttttactgatgacggcgatttgccgtttgctgacgccaatatccagcaacccggcaggcaaccgactttccgggtcatttgcgccatggacatagatcagcatgtctacatcctgtagcgtggtaattaaggcgtgataccagcggggatggttaaaatattcacccggcgtatcaatatcgcccttatcattaaattccacggcctgtgtttttctggcgagggtataattcccctgcaacgcattaaataacgttgtttttcctgccccgacgctacccacaaacgcaattcgtttcatgaatgcctcgtattaacttttggtcatttcacaaagcgtataatttaataagcgacctaaaccgctgacggtttgacttaacgcttcttctactgcgcccacgctgccataaatcaccaatgcaccgctgaatcggtcgagaaaaccgatatgcacatcagcggctttcagcgctaaatcaccggcgatcatcgccgtttcgccgggagttagcgtcataatgccaattgcgcccgcatccggaacgccgattttcttcgccagttcctcaccgggatgcgcgatgagatgcgccagtgtgacctgtttgccgggcacaaattcctgaatgatgcgttctttatccatgagtcgccgcctgtgaaaaactttcgtgtatcgtgacaatttttcgtcagagtaaataacaaaattcggcaagcgcgtttaaaaggtgaggtagatcactaagaatggagagatattcgctgtggtgcataaactttcatatgcaacgcatgaatataaataaaataatatcgagatattatatagactgcttttttttattattcgcaaactcagtaataagctttactaatatattgcagctaaactgcttaccctgaatattcagggtaagcgtgagagttaaaaaaaattacagcggttgggtttgcgcttctaccacggccagcgccaccatgttgacgatacgacgcacgcttgcgatcggcgttaacacgtgaaccggtttcgccacacccatcagcaccgggccgacagtcacaccttcgctgctggaaacacgcagtaagttgtaactaatgcgggcagcttccatgttcggcatcaccagaatattggcggaacctttcaaagagctgtccggcatacggtcgttgcgaatcgcttccaccagcgctgcatcgccgtgcatttcaccatcaatcatcagttctggtgcacgttccctgaccagttccagcgcctgacgcattttgctgctgctcgggcagtcagaagaaccaaagttggagtggctcaacaaagcaacgcgcggctcaataccaaaacgacggacagtttctgccgccatcaaggtgatctccgccagctcttctgcatccggttcatcattaacatatgtatcggcaataaaggtgttaccactcggcagcagcagcgcgttcatggcacctgcggtgtgaacgccatcgcgataaccaaagacatttttcaccacgctaaaatgttcatgataatcacccaccgtaccgcaaatcattgcatcggcttccccacgctgaaccatgatcgcgccgatcactgtcgggttactgatcagcgcccgctgcgcctgttcctgagtgacgccgcgacgcttcatgatctggaagtattcggtccagtactctttaaagcgcggatcggattcgttattgacgatctcaaaatcaacgcccgctttgatctgcaagcccagtttctgaatgcgcatttcgatcacgttcggacgaccgataaggatcggtttcgccagtcccagcgttaccagttcctgagtggcatgcagaacgcgcgcctcttccccttccggcagaacaacgcgcttcggcgctttgcgagcctgggagaaaatcggcttcataaacaggttggttttgtaaacgaactcagtcagcttgtcgatgtagacgtcgaaatcagcaatcggacgagtcgccacgccgctctccatcgcggctttagcgaccgcaggagcgatcttaacgatcaagcgcggatcaaacggctttggaatgatgtattccggaccaaagctcagatcctgatcgccatacgcactagccaccacttcgctctgttccgcatgggcgagttctgcaatcgcacgtaccgccgccagtttcatctcttcgttgatggcggttgcgccaacgtccagcgcgccacggaagatgaacgggaagcacaggacgttgttcacctggttcggatagtcagaacgaccggtgcaaatgatggcatccggacgcacttctttcgccagcggcggcagaatttccggttccgggttcgccagcgccaggatcattggcgcacgagccattttcttcaccatttcctgggtcagcactttcgggccggaacagcccaggaaaatatccgcgccttcaatcacatcatcgagggtacgtttgccgtcatccaccaccgcatatgcggctttggtttccgccatgtttggctcacggccctgatagataacgcctttactatcgcaaaccacgatgttatgtttttgcagacccagcgctaccagcaggttcatacaggcgattgctgcggcacccgcgccggaaaccaccatccgcacgtcggagatgtttttctccaccacgcgcaagccgttgaggatggcggcagtgctgataattgccgtgccgtgctgatcgtcgtggaataccggaatattcatccgctcgcgcagtttctgttcaatatagaaacattctggcgctttaatgtcttcgaggttgatgccgccgaaggttggttcgagcgcggcgacaacttcaataaatttgtccgggtcgagttcgtcaacttcaatgtcaaatacatcaatcccggcgaatttcttaaacagaacgcccttgccttccatcaccggtttgcctgccagcgcgccaatgttgcctaaccccagcaccgccgtaccgttagagatcaccgccaccaggttacctcgggcggtatatttgtaggcttttaacgggtctttttcgatttcaagacaaggtgcggcaacgcctggactgtaggccagcgccagatcgcgctgtgttgccagaggcttggttggagaaacctggattttccctggaactggaaattcatggaaatcaagtgcactttgttttaactggtcatccatttggttgttcctttcacgtaacgttcacaaataaagtgtgtgggcaacagcccctgcccacaacgtggcgcacattattaccctgccggagtctacagactttgagcaagtccaaactctcaccattaatataatgttttggtaataatcctataacactgatgttacctgcttaatccagcaataccatgcctgtctgctatgcttttttgatgcgtttagcgaaatttctcagaagtgtgaattaacgcactcatctaacactttacttttcaaggagtatttcctatgaacgagttagacggcatcaaacagttcaccactgtcgtggcagacagcggcgatattgagtccattcgccattatcatccccaggatgccaccaccaatcctagcctgttactcaaagctgccggattaagtcaatatgagcatttaatagacgatgctatcgcctggggtaaaaaaaatggcaagacccaggaacaacaggtggtcgcagcgtgtgacaaactggcggtcaatttcggtgctgaaatcctcaaaatcgtacccggtcgcgtgagtacagaagttgatgcacgcctctcttttgataaagaaaagagtattgagaaggcgcgccatctggtggacttgtatcagcaacaaggcgttgagaaaagtcgcattctgatcaagctggctagcacctgggaaggaattcgcgcggcagaagagctggaaaaagaaggtattaactgcaacctgacgctgctgttttcttttgcacaggcacgggcctgtgcggaagcaggcgtttttctgattagcccgtttgtcgggcgtatttatgactggtatcaggcacgcaagccgatggacccgtatgtggtggaagaagatccgggcgttaaaagcgtgcgcaatatctacgactactataagcaacaccactatgaaaccattgtgatgggcgcgagcttccgtcgcaccgaacaaatcctcgccttaaccggctgcgatcgactgactatcgcaccgaatttactgaaggagctgcaggaaaaagttagcccagtggtacgtaaattaatcccaccttctcagacgttcccacgcccagctcccatgagcgaagcggagttccgttgggagcacaatcaggatgcgatggcggtagaaaaactgtctgaaggcattcgtctgttcgccgttgatcaacgcaaactggaagatcttcttgccgccaaactataaaccagccacggagtgttatatgtcccgaaaagaccttgccaatgcgattcgcgcactcagtatggatgcggtacaaaaagccaactctggtcatcccggcgcgccgatgggcatggctgatattgccgaagtgctgtggaacgattttcttaaacataaccctaccgacccaacctggtatgatcgcgaccgctttattctttccaacggtcacgcgagcatgctgctctacagtttgctacatctgaccggttacgacctgccgctggaagaactgaagaacttccgtcagttgcatagcaaaaccccaggccacccggagattggctatacgccaggcgttgaaaccaccaccggcccgcttggacaaggtttggcgaacgccgtcgggctggcgatagcagagcgtacactggcggcgcagtttaaccagccagaccatgagatcgtcgatcacttcacctatgtgtttatgggcgacggctgcctgatggaaggtatttcccacgaagtctgtagcctggcaggcacgctgggactgggcaagctgattggtttttacgatcacaacggtatttccatcgacggtgaaacagaaggctggtttaccgacgatacggcaaaacgttttgaagcctatcactggcatgtgatccatgaaatcgacggtcacgatccgcaggcggtgaaggaagcgatccttgaagcgcaaagcgtgaaagataagccgagcctgattatctgccgtacggtgattggctttggtagcccgaataaagcaggtaaggaagaggcgcacggcgcaccactgggggaagaagaagtggcgctggcacggcaaaaactgggctggcaccatccgccatttgagatccctaaagagatttatcacgcctgggatgcccgtgaaaaaggcgaaaaagcgcagcagagctggaatgagaagtttgccgcctataaaaaggctcatccgcaactggcagaagagtttacccgacggatgagcggtggtttaccgaaggactgggagaaaacgactcagaaatatatcaatgagttacaggcaaatccggcgaaaatcgctacccgtaaggctagccaaaatacgcttaacgcttacgggccgatgctgcctgagttgctcggcggtagcgcggatctggctcccagcaacctgaccatctggaaaggttctgttagcctgaaggaagatccagcgggcaactacattcactacggggtgcgtgaatttggcatgaccgctatcgccaacggcatcgcgcaccacggcggctttgtgccgtataccgcgacgttcctgatgtttgttgaatacgcccgtaacgccgcgcggatggcggcactgatgaaagcgcggcagattatggtttatacccacgacagtattggcctgggcgaagatggtccgacgcaccaggctgttgagcaactggccagcctgcgcttaacgccaaatttcagcacctggcgaccgtgcgatcaggtggaagcggcggtgggctggaagctggcggttgagcgccacaacggaccgacggcactgatcctcagtaggcagaatctggcccaggtggaacgtacgccggatcaggttaaagagattgctcgtggcggttatgtgctgaaagacagcggcggtaagccagatattattctgattgccaccggtagtgagatggaaattaccctgcaagcggcagagaaattagcaggagaaggtcgcaatgtacgcgtagtttccctgcccagcaccgatattttcgacgcccaggatgaggaatatcgggagagcgtgttgccttctaacgttgcggctcgcgtggcggtggaagcaggtattgccgattactggtacaagtatgttggtctgaaaggggcaattgtcgggatgacgggttacggggaatctgctccggcggataagctgttcccgttctttggctttaccgccgagaatattgtggcaaaagcgcataaggtgctgggagtgaaaggtgcctgatggtgattgccggatgctgattgccggatgcgacgctgacgcgtcttatccggcctacagcgtcttatccggcctacatgtcccgccattttgtttaacgggtgatccacaacgtgggccaggcgtctggcccatgccagttatcgcaggtgggttctgcggcgtaacgcaccaggcgaaaacgctgaccgtcaaagcgccagcgcgcctgaatgccacaatcgcttaatccgcgccctttcgctaaggtcaccagttcacggcttttctcatcaaatgttgcgttcatcagttccagttcattcgtctcctgaccgttgttgaacggcaaacgcaaccgaaccgggcggctagctagtggctttttacggctcacaatccatgccaaatcaatggtgttataggcccctgcctcacagctaatcatcatcagcgctttatcatcagtcagcgcagtgacattcacctcacgacgcaatggatcaaggctgcagcgcagaccattcatccgccagtttccataatccagcaaatcgttgcgttcttcgagactgagtggcgtcggcgttgggttaaccaccgcgacctctttcagcgcaggcgcgggcggtacgctgagcggcggttcgtcccctttcttgatccacgcggtttcactgccaacgcgcttttgctgagcatcaataaacaacaacgctgcttttaagccactcagagaaatggtctgatcgccatcgcgtaaggtgattgccttcccttcctgaatcatctgcaaaaacgcggtgatggttgccgtatcatcggttactaataaccatggactaatccgccacttgtcaccacttaacgccaacggctcgccatctaacagcagccgtggcgctatctccccttcactcgcctccgggctcttcaatccgccgcgctcaatacgtaaaacggcatcggtatgcgccccggcgctgcggctcagggtcatcaccagtccattatgatcgcccgtattacgcgccacgcagaaattttggttattacaggtgacctgccagtcggaaaacgcccgttgcgctggtgccgcccacaccaaagacgtcggcaacaaagcgaaaaaaaagagaaggaaaatgcgatagcgcatggacggtacgaccccagaagttcaaacaaacagcacaagtcgtatcttcgttgcgcaggtagcgcggctcaatcggatttgtcggattgagccaataataaacaacgaaatattattgttatttttcagtccattaaatgactcgtttgcaaatagttaagcaataacaccgtcttaccgtcacgtatctcgccggttttgatcatctccagcgcctggctgaacggcagctcgagcacttcaatatcttcatcttcgacaccgccaccggcgttagcgcgctgattgtcactgtattcggcgataaaaaagtggattagctcagtcacaccgcctgggctcatatacagttcaaataatttgcgcacttcacccacttcatagcccgtctcttcaatcgcttctttgcgaatacacacttccggttcgtcgttatccagcagcccggcgcagctttcaatcagctgcccgctttcattgccattaacccaggtagcgacacggaactgacgaatcagaaccacggtctttttcttcgtgttgtacaggaggatcgtcgcaccattgccgcgatcgtacacttcacgtttatggcggataacttcgccgtctttgcgcgtgagatcgtaagtaatgttgtgcagggtgaaatagttatcggagagaattttgtctttaatgagggtgatttgttgcgtcataccgactccacagcgcgaaatgaacaattatcttacgctgtgaagtcgggtttgtctgcgcaggctatcagtgagatttgacactttttacccccagccagtcaataatcccctgtgccgcatgacgtccttctgccattgcggtaaccaccagatccgcaccacgcacggcgtcaccaccagcgaagattttcggattggtggtctggtaacggtactggctttccacatccgcgatgatgcggccccatttgtctaccgttacaccgtggctctccagccacggcatcccgtgcggattgaagccaaacgccataatcaccgcgtcggctggcatgacaaattcactgccttccaccggcactggacgccgacgcccctgggcatccggctctccaagacgcgtgcgcaggaaacgaatcccgcagacgtgaccttgttcattcagctcaagcgccaccggctggacgttaaattcgaagttggccccctcttcgcgggcgttcttcacttctttcttgctgcctggcatgttagcttcatcacgacgataagcgcaggtgacgttactcgcgccgtggcgcagtgcggtacgcacacagtccatcgcggtgtcgccgccgcccagtaccacgacgttaagtccggcggtattgataaacggctcttccggtagctcttcgagccccatcacctgtttagtgttggcaatgaggaacggcagcgcgtcataaacgcccggcgcatcttcattgggtaaacccgctttcatggaacggtaagtgcctacgccaacgaagaccgcgtcgtattgttccaaaaggctatccaaagagacatctttacccacttcacaattgagttcgaagtgaatccccatcgcgctgaagatttcccgacggcgtgccagcagggatttatccagtttgaaagaaggaatgccgaaagtgagcaagccaccgatttctggatggcgatcgtacaccgtcacccccacgccattgcgggtcagaacatccgcacaggccagccctgccggacctgcaccgataatcgccacccgcttgtccactttggtgacatggcttaagtcaggacgccaacctttcgccaacgcctgatcactaatgtagcgttcaatgttgccgatagttaccgcgccgtgctcatcgcgaatagtacaggcaccttcacacaaacggtcttgcggacaaacgcgtccggtaatttccggcagggtgttggtctggtgagaaagctcgacggcggcgtcgatgtttccggctttcaccagttcaatccactgcggtatatggttatgcagcgggcaggtccattcacaaacgctgtgctcgccgcacttaaggcagcggctggcttcccgttgtgcctggtcggcgcgaaatggcagataaatttcatcaaaaccggttttgcgcgcttcaatcgccagtttatccggctcgccacgcgcgggcgttgcctgcatttgttcgactttactcattaccggcatttcttgcgccgcggtactggcatgccacggttgatgttcctgacgcgcggtgcgcaagcggcgggatttcgccatgccggagagtgcgacgtcagtgaccagttgcagcgcgtccgccgggcaattctcaacacaggcaggaccgttttcgcgccccgcacaaaggtcgcatttatgcgccgtggcttttacttttcctgccgcgacgggtgtcaggacgatttgcatcgtaccaaaaggacaggccaccacgcaggatttacagccaatacacttttgctgattgacctgaatgctgtcatcaacgtggctgattgcgccattagggcagctacgggcgcagggcgcatcttcacaatggtgacaggtcactgcactacgttgctgttgatgtttgataaccgtaattcggggatgaaaatggtgttggctcaggacatgttgctcatcattgtgagccatgacacaggcgatttcacaagcatgacaacccagacattgctgactgttggccataataaaacgattcataacgaccttcttttttggttgtaaaaaccttattctttatatgagtgttgttattacccgacttacaggggaatcggcaatgttcatgtgcccagaataagtaactatttcgctataaactgtggcagatcaaataatcccatcactgactaaattgcgtttcagcgaactggaacattaatgattttttgtggagaagacgcgtgtgattgttaaacgacccgtcagcgccagtctggcccgggcctttttttacattgtgctgctgagcattctttccacgggtatcgctctgctaactctggcgagcagtttgcgcgacgctgaggctatcaatattgccggaagcctgcgtatgcagagttaccgcctgggctacgacttgcaaagtggcagtccacaactcaatgcacatcgccagttatttcagcaggcactgcatagtccggtattaaccaacctcaacgtctggtatgtgccagaagcagtaaaaactcgctatgcgcatctgaatgccaactggctggagatgaataatcggctcagcaagggcgatttgccgtggtatcaggccaatattaataattatgttaatcagatagacctgttcgtactggctttacagcactacgctgaacgcaaaatgctgctggtggtggcgatttccctggctggcggcatcggtattttcacgctggtcttttttactttgcgccgcatacgccatcaggtggttgccccgctgaatcagctggttaccgccagtcagcgtattgaacacgggcagttcgacagcccgccgctggataccaacctgccgaatgagcttggtctgcttgcaaaaacctttaaccagatgagcagcgagctgcataaattgtaccgtagcctggaagcgagtgtagaagaaaagacccgcgatctccacgaggccaagcgtcgtctggaggtgttgtatcagtgtagccaggcgctgaacactagccagattgatgtgcattgtttccgccatattttgcagattgttcgcgacaatgaagcggctgaatatctggagttaaatgtcggtgaaaactggcggattagcgaagggcaaccaaacccggaattgccgatgcagattttaccggtgacaatgcaagagacggtttacggcgaactgcactggcaaaatagtcacgttagtagtagtgaaccgctgcttaacagcgttagcagcatgctgggacgcggtttgtactttaatcaggcgcagaagcattttcagcaattattgttgatggaagaacgtgcgaccatcgcccgcgaattgcacgacagcctggctcaggtactttcttacttacgtatccagttgacgttactgaagcgtagcataccggaagataacgccaccgcacaaagtatcatggccgatttttcccaggcgttgaatgatgcttatcggcagttacgcgagctgttgactactttccgcctgacgctgcagcaggcggatctcccctccgcattgagggaaatgctggatacgttacaaaatcaaaccagcgccaaactgaccctcgactgccgtctgccaaccctggcactggatgcgcaaatgcaggtgcatttgttgcaaattattcgcgaagcggtgctgaatgcgatgaagcacgccaacgccagcgaaatcgccgtcagttgcgtcaccgcgccggacggcaatcacacggtttatatccgtgataacgggattggtatcggtgaaccgaaagaacccgaaggtcattatggtctgaatatcatgcgcgaacgcgcggaacggctaggtgggacgctgacttttagtcaaccttccggcggcggcacgttagtgagtattagctttcgctctgcggagggtgaggaaagtcagttaatgtaatgcctcctactgaccaaagaatacttgcacttaaggttcagtataaaagggcatgataatttacattaactcctttttttctccacgattggctcgtaccttgccgctacagtgaagcaagtcaagcctacaacgatacgcagaaacacgaggtcctcttttaatggcgaatttctttattgatcgccccatttttgcctgggtgctggcaatcctgttgtgtctgacaggtaccctggcgatttttagtttgcccgttgaacaataccccgatctcgcgccaccgaatgtgcgagtgaccgctaactatcccggcgcaagcgcccagacgctggaaaacaccgtgacccaggttatcgagcaaaatatgaccggcctcgataatctcatgtatatgagttctcagagcagtggcaccggtcaggcatctgtcactttaagttttaaagcaggcaccgatccggacgaagccgtgcagcaagtacaaaaccagctgcaaagtgccatgcgaaagttaccgcaggcggtgcaaaatcagggcgtgacggtgcgtaaaaccggcgataccaacattctgaccattgccttcgtctctaccgatggtagcatggataaacaggatattgctgattatgttgccagtaatattcaggacccgttaagccgcgtgaatggcgtcggggatatcgatgcctatggtagccaatattccatgcgtatctggctggacccggcgaaactcaacagtttccagatgacggctaaagatgtcactgatgccattgagagtcagaacgcgcagattgcggttgggcaacttggtggtacaccttccgtcgataagcaggcgctcaacgccaccattaacgcccagagtctgctgcaaacaccagaacagttccgcgatatcaccttgcgggtcaatcaggacggcagtgaggtaaggctgggcgatgtcgccaccgtcgaaatgggggcggagaaatacgattatcttagccgcttcaatggtaagccagcctccgggctgggggtaaaactggcctccggcgctaacgaaatggcgacagcggagctggtgctcaatcgtctcgacgagctggcgcagtatttcccgcatggactggaatacaaggtggcgtatgaaaccaccagctttgttaaagcctccattgaagacgtggtgaaaacgctgctggaagctatcgctctggttttcctcgttatgtatctgttcctgcaaaacttccgcgccacgctgatacccactatcgccgtgccggtggtgttgatgggaaccttctccgtactttacgccttcggttacagcgtcaacaccttaaccatgttcgcgatggtgctggcgatcggtctgctggtggatgacgccatcgtggtggtggaaaacgtcgaacgtattatgagtgaggaaggactcactcctcgcgaagccacacgtaaaagcatggggcagatccagggggcactggtcgggattgcgatggttcttagcgcggtatttgtaccaatggccttcttcggcggcaccaccggtgccatctatcgccagttctctattaccattgttgcggcgatggtgctgagtgtactggtagcgatgatcctcactccggctctgtgtgccacactacttaagccactgaaaaaaggtgagcatcatgggcaaaaaggcttttttgcctggtttaaccagatgtttaaccgcaacgccgaacgctacgaaaaaggggtggcgaaaattctccaccgtagcctgcgctggattgtgatttatgtcctgctgcttggcggcatggtgttcctgttcctgcgtttgccgacgagcttcttaccgctggaagaccgtggcatgtttactaccagcgtacagttgcccagcggtagtacgcaacaacagaccctgaaagtcgttgagcaaatcgagaaatactacttcacccatgaaaaagacaacatcatgagcgtgtttgccaccgttggttctggccctgggggtaacgggcaaaacgtggcgcgaatgtttatccgcctgaaagactggagcgaacgcgacagtaagaccggcaccagctttgccattatcgagcgtgcaacgaaggcgtttaaccaaattaaagaagctcgcgttatcgccagcagcccgccagcaattagcggtcttggtagttctgcaggttttgatatggagttgcaggaccacgctggagcgggtcacgatgcgctgatggcagcacgtaatcagttgctggcgctggcggcggaaaacccggagctaacccgtgtgcgccataacggcctcgacgacagtccgcagttgcagattgatatcgaccagcgtaaagctcaggcgctgggcgttgctatcgacgatattaacgacacactgcaaaccgcctggggtagcagctatgtgaatgactttatggatcgcggtcgcgtgaagaaagtctatgtgcaggcagctgcgccgtatcgcatgctgccagatgacatcaatctctggtatgtccgaaataaagatggcggcatggtgcccttctctgctttcgcgaccagtcgctgggaaacaggcagcccgcgtctggaacgctataacggttattctgcggttgagattgttggggaagccgcaccgggggtcagtaccggtacggcgatggatattatggaaagcttagtgaagcagctgccaaacggctttggtctggagtggacggcgatgagctatcaggagcggctttccggcgcgcaggctccggcgctgtacgccatttccttgctggtggtattcctgtgtctggctgcgttgtatgaaagctggagcgtgccgttcagcgtaatgctggtcgtgccgctgggggtaatcggcgcgctgctggcaacctggatgcgcgggctggaaaacgacgtttacttccaggtgggcctgttaacggtcattggtttaagcgcgaaaaacgccatcctgatcgtcgagtttgctaacgagatgaaccaaaaaggccacgacctgtttgaagcgacgctccacgcctgccgtcagcgtttacgcccgattctgatgaccagcctggcatttatcttcggcgtattgccaatggcaaccagcacgggtgccggttccggtggtcagcatgcggtgggtactggcgtaatgggcgggatgattagcgccactattctggctatttacttcgtgccgctgttctttgtgctggtgcgccgccgcttcccgctgaagccgcgcccggaataagcaataaaaaaggcgacatgccaatgtgtcgcctttttcaactttccgattaagaacctgctcagcgggttcttgctgtttgtactttgtctcaggaattacttacgaagcataacttcgataaagtctttccagttccccagttcacgttcaatcataacaacctctcttataattatgggtattctacggaaacaatataccgtggtgaagctaatttactcgattgctgcgatgactacctccgggggacaaatcttatgtaaatactatggtcctgcggtgatgatttgtatgtgatacacagcaacatttcgagatattcatacggcatctaatactgatttaattctggttaaaatacagacagataacaagatgaatattcttaatgtttacgttaaaaatgtttaatattatttaatagttgttaatttgaatacttcgataatgttatatttcctgataatcatttgcaggcaaaatgttttcacccttaaatgagtatttattctcataaatcgaaaaaggattcattatggttacactttacggtatcaaaaattgtgacaccattaaaaaggctcgccgttggctggaagccaataacatcgactatcgttttcatgattaccgcgtcgatgggctggacagcgaattattgaacgattttatcaacgaattaggctgggaagcgttactcaacacccgtggtacaacctggcgtaaactggacgaaaccacccgcaataaaatcaccgatgcggcctctgcggcggcattaatgactgaaatgcctgcaattatcaaacgtccattgctctgcgtgcccggtaagcctatgctgctgggtttcagtgattccagttatcagcaatttttccatgaggtgtaatctatgagctgcccggttattgagctgacacaacagcttattcgccgcccttccctgagtcctgatgatgcaggatgccaggctttgttgattgaacgtttgcaggcgatcggttttaccgttgaacgcatggactttgccgatacgcagaatttttgggcatggcgtgggcagggtgaaacgttagcctttgccgggcataccgacgtggtgccgcctggcgacgccgatcgttggatcaatcccccgtttgaacccaccattcgtgacggcatgttattcgggcgcggtgcggcagatatgaaaggcagcctggcggcgatggtggtggcggcagaacgttttgtcgcacaacatcccaaccatacggggcgactggcatttctgatcacctctgatgaagaagccagtgcccacaacggtacggtaaaagtcgtcgaagcgttaatggcacgtaatgagcgtctcgattactgcctggttggcgaaccgagcagtatcgaagtggtaggtgatgtggtgaaaaatggtcgtcgcggaagtttaacctgcaaccttaccattcatggcgttcaggggcatgttgcctacccacatctggctgacaatccggtacatcgcgcagcacctttccttaatgaattagtggctattgagtgggatcagggcaatgaattcttcccggcgaccagtatgcagattgccaatattcaggcgggaacgggcagtaacaacgttattccgggtgaactgtttgtgcagtttaacttccgcttcagcaccgaactgactgatgagatgatcaaagcgcaggtgcttgccctgcttgaaaaacatcaactgcgctatacggtggattggtggctttccgggcagccatttttgaccgcgcgcggtaaactggtggatgcggtcgttaacgcggttgagcactataatgaaattaaaccgcagctactgaccacaggcggaacgtccgacgggcgctttattgcccgcatgggggcgcaggtggtggaactcgggccggtcaatgccactattcataaaattaatgaatgtgtgaacgctgccgacctgcagctacttgcccgtatgtatcaacgtatcatggaacagctcgtcgcctgatgagtggttctgcaagaggaaataagcatggactggctggctaaatattggtggattctggtgattgtctttttggtaggcgtcctgctgaacgtgattaaagatctcaagcgcgtcgaccataagaaatttctcgccaacaagccggagcttcccccgcatcgtgatttcaacgataagtgggacgatgacgacgactggccgaaaaaggatcaaccgaagaagtaagctgagtgctcaaccgtaggccggataaggcgttaacgccgcatccggcaatggtgaacgatgcctgatgcgacgctcacgcgtcttatcaggccaggtaatctgtcttttacatcatttcaatcacatcatcatcgccaggcttaccgccacttagcgcttcgtcgaaataatgtttcggaatggtataacgcaagtgatccagggcaaattgcatactgcgattgtcgatcgcatggcctaaatcctccacgatatccagcgtcacgtcaccaccggcactgattaacgcttcctgcgccgcaaccgcatgcgccagatcgataaccggatcttcaccgccatgaatcaggtgaattgtcgtggctgtagacgcagtttccggcaggctcgcatagcgtccgttaaaagcaatgacgcgactagcaaggcccggttcggctttaatgctctccagcaccataatcgcgccttgagagaaaccgatgagcgccgtggcgttagcccctactccgctctgtttctgccagtagcgcaccgtttcaataaacgtcggcatgatcgcatccacacgcgcctggcgattatcttccgtaataccctgcacgctaaaccactgacgccccgccggattaccgctcggctccgcgccaccgacactcaccaccagcgcatcaggaaacagcggtgcaaaccagttgcctatttcccccattgccaccgggttatccccgacaccgtggaaaagcagtaacaactgttgcgcaggtttatccgggctttgaacaacaaaatggtcatgtttcatggcgaactccttaactgatgtcattaattttacgccgctgactcacaatgaccatgagataaaattgaaggagtcagtgaaataattgccattgcgttatgcgatcgcgcagacgctcagtgcgaacatcattaagtgcgaacagcgcctgcgcggcctcttcccgctgacggaccagtaacatcttgcggccactaagtttaagtgtggtacataactgcgcatcactggcgtttttctgtaaacgcccacgcagcgccggtaatgccagttcactggtttgtaacagacgcaataagcaacctaagctcgttaatagcggacgatgagcgaaagcaaaaccggccagttcaagccagtcgtcgtcagaaaggacggcatcgtttagtggatcaacaggaagcgtttcgccattccactgcgcgagagcttgcgcatcgcgacgtaaacggtaatgctcacgttcagccagctgtttacccgcatcactcatcggtaacagcgccatcgccgtatagcaaccgctgctggcttcccgatgattacccatccgcaccagcacaaaaccgcagcgttgccagaaacgccataactccccggtgtaaccaaaactcacgctaagatagtcgaggtcttgcgtatattgcaaagcaccagcaataagttgccgccctgtgccttcccgctgacgagccggatgaactgctatccggctgacccgccgtccacgcaatgtcgccgccagtggattgttgccgtgcgccgccaggctctgggccaccagattaccccgcgggcgacgaaaacctgcccataccgcctgactgagttgttgagataatccaccctcatccaccagccacagcgccccggcaatctcgttttcgccagccgcctgtaaaaaatgttgccctggtgcatccatcatccggcgtaaatccagcgggctagtccgatagtgcgcaccagacaagagctgataaacctttaacggcgtttctggatcgctttgccataacgtctgttcaaatgcggaaatgacaatattgccttgtggtgtatgggtgaagttttcatcgtcaaaaaccagtgcctcgctgaccattttttccagcgggcatccctgcgcccagcggatcggctgttgcagttcaaaacggtgtaaatgcggaaagcgagcgcaaaatttcagcaaaaaaccacgtccggtgccttcgtagccctgcaccgtagtggttaacaacgttcgaggaaaacggcttaccagttgatgcaacaatggcgcaggtatggctgcggcttcatcgaccaccagccagtcggcttgctcatcgctggctaacaaggcatccggcgcaataaagcgaaacttctcgcccgcaaattgtgccagtacatccgtactcgcttttgcgggcgcggtgacaatcgctctgcccgcaatacgagaaatgagttgccctgccaacgcgctcttaccgcgcccacgcgcagccgttaccgctgccacgcccggcggcatggtcattagctgctttaagagttgctgttgttctggttgtggtgcgccagtcgcggggtaccagtcagtacggggagtaaaatgcgccaagctgaatggctggttttgccgccagaggatagcctcgttatccgccgtaagtacgcgtttgagatgctggacaaaatgcggcgtcgcaatagggtcagggcaatcactccagcgcaggctgtcggcatcaggttggttttcccactcttcccatacagggagtaacaaaaccagccagcttcccgctttcaacgttccgctaagtgcggcaaaggcagcggcatcaaagccgtggcgggcgtcgaataccgcatgccggaactcgcgcccaagtaaagtttgtagtgcgctgggagaacagtggttttcagcatctggccgcgggctaatccacagccagtcgccaggtaaggcatcacgcaacttaagagtatgctcaaaacaccaaccctcttccccgctcaacaccagcaagcggcggatcccttcacgtttcatttgcgctgttaatgtgtgaagcgcagtcagttcagccatccctgccccggaagttaaatgcttttaccaaaagtattgcattgtgccggatcgccgctgtcgaaaccacgtttaaaccagctgtagcgttgctgagaagtgccatgagtgaaactgtctggtactactcgcccctgactttgctgttgtaaacggtcatcgccgatggcctgcgccgcgttcagcgcctcttccagatcgccggtttccagaacgccttgctgctgcatactatgcccccagacaccggcaaaacagtcggcctggagttccatacgcacagataagcggtttacttccgcctgcgtcgcgttttgttgcagttgacgaactttcggctcgatgcctaacagtttctgcacatgatgaccgacttcatgggcgataacgtacccctgggcaaaatcgccatccgcgccaagtttgtctttcatgtcatcatagaaggagagatcgatataaaccgtgccatccgccgggcaatagaacggccccattatggactggcccgccccgcagccggtacgcgtcattccacggtacatgaccagcttcggttgctgataggtcttacccatcttctcgaactgttgtccccaggtgtcttccgtggttgccagaatcacgctggtgaattttgcggcttcgtcttcatttgggctaatactccgcgtactttgttgttgggaaaccggctgcccggtcatcaacccggttaaatcaacaccatagtagcctgcaaccagcacgactatcagtaaaatcagcccgcctttaccgcttggcaggcgaaaaccgggaccgcccatagatggaccaccagagctgttgcgcctgtcttcaacattgtcactttcacgtcgcccttgccaacgcatagatacctcaacaatatattcattatagaaatgatcgtaggtggttcagaggaagattaccacaggaaagcgggatgaaatggcggaggaatgagcgttcaatgcatatattccgagagcggttgtcttgccgtgccagctgcacggcaagatgatgaacagaaaaatcagtccagctgtacacccaggcggcgggcgacggcttcataggcttcgatcaggccaccgaggctctggcggaaacggtctttgtccattttctccagcgtttctttgtcccacaggcggctaccgtccggggagaactcatcacccagtaccacttcgcctttgtacagaccaaattccagcttgaagtcgaccagaatcagaccagcatcatcgaacagttttttcagcacgtcgttcgctttgtaggtcagctctttcatacgcgccaggttctctttgctcacccagccaaaggtttcgcagtaagattcgttgaccatcggatcgtgcatggcgtcgtttttcaggaacagatcgaacagcggcgggttcagctcaataccttcttcgattccaagacgtttcaccagagagccagcagcacggttacgcacgacacactcaaccggcaccatatccagctttttcaccagacattcggtatcggagagcagacgctccatttgagtcgggatacccgcttcagccagtttgctcataatgaagtagttgaacttgttgttcaccatacctttgcgatcaaactgctcaatgcgcgcgccatcccctgcactcgtatcattgcggaattcgagcaccaacaggtccgggttttccgtgctgtatacggttttcgctttaccacgatacaactcagcttgcttttgcatctttatcactcctgggtgtgaattaacgttttaaaatcttttgctgtctggtgtgccggatgttttgtcggatgcggcgtgaacgccttatccgaactacgtccgacaaacaaatttcgtgcgaattaccgctaaaatcgcgttttcctgcagacgcacacgtttgcgtatcatatcagaaaaaagggccggatgattccagccctgtatttttacttgctaaacgcagcctggaagacagctaccagcgcgtcgttctgactctgagtcagagtatgacctttcggatcgatgaactgtaggctgctgcggttatctaaatcgccaacctgcagtttatagtcaccggatgccaggcctggatcgctcgcgcccagttcctgccagtcgctgtcagacagcggcttataagttacggccatgttgccctggctacgggtgctgtcggtcactttcatgcccactttttccagcgccgctggcagacgttgccaaaccacattgaacggcccgcgtacgaccagcattggtaaaccggtgtcatcagctgcactttgtacgtccatagtggtggaggcacgattttgcgcagcgttcgcggcgtcagtggcagatttatccagaccggcggaaataacgttcatcatctccgtgctgtaacgctgcatggaagccgcgtctgcaaccggtttgcccgcctgttccaggttcagcagtttaaccgtaaccgcctgctgataaccctgcggcttaacagagatttgataacgaccacgatactgctcgtcttcgtccagacggttccattgtacccaatcggtggtcagtgtctgaccagcatcatcacgttgggtgatggtgtagtttttcgcctgcagcacgctaaccacctgcggccacagagtattgccacgaccattttccaccagcaaactagcggtatcgcccgtgaactgggtacgcgcgccagaaaccagtgccagcggctgggctggtggacgaatgtccagcgccttaccgacagcaccactaccgttggtcaccgggattgcataatcaccggaggtcaccggcaaaatcattccagccggggcatgaagctccgcaagcggtgccgcttccaggtaggcttcatcaccactgacctgacgcttatagcgactgtcagaactacaggcagcgagtaataaaacaaggctaacacccgcaacctttgccaggcggctcttttgaacagagtaagccatcaaatctccctaaactttacagcaaaccggcatgcttaagcgccgctctgaccgtctcacgaccactgtcggtgattggtgtcattggcaggcgcagcgtatcggtcgccacaagacccagttccttacatgcccatttcaccgggattggattgggttcgacaaatagtttgttgtgtaatggcatcagacgctgattaataacgcgtgcctcggcaaaatgcccttctgctgccagtttgcacatctgggccatatcacgcgctgcgacgttagccgtaacggaaataaccccatgaccgcccaattgcatgaagtccagcgcgctcgcatcatcgccgctcagcagaacaaaatcatcactaaccagctctttgatctggtttacacgcgttaagttccctgttgcctctttgattccgataatattttttactttcgccagacggcccaccgtttccgggagcagatcgcagccagtacgggacggcacattatacagaatttgcggcaggtcagtatgctcagcgatggctttgaaatgctgatacaaaccttcttggctcggacgattgtagtaaggggttaccgtcaggcagccgacgataccactgtcattgaagcgctgcgtcaggctaatggcttccgcagtagcgttagcgccggtcccggcaattaccggaatgcgcccatcagccagatccagcgtcatcatcaccacatcagcatgttcgtcatgatttaaggtagcggactcgccagtggtgccaacagaaacgatcgcgctagtaccgctggcgacatgataatcaatcagttttttcaagctagcccgacagacattacctttttcatccatcggagtaacaatcgcgacaatacttcccgtgaacatgggccatcctctgtgcaaacaagtgtctcaatggtacgtttggtatggcattaaaagcaagcagacagaaccgttctgattgttgtatgcatgttttttttatgctttccttaagaacaactcaccccttaaaggaataaccagtttgacactgagtagccaacattatctggtgatcactgcgttgggtgccgatcgccctggaattgtgaacaccatcacccgtcatgtcagtagttgcggctgtaatattgaagacagtcgcctggcgatgctgggagaagagttcacgtttattatgctgctttccggtagttggaatgccattactctgattgaaagtacgttaccgttgaaaggtgccgaactggatcttttaatcgtgatgaagcgcacgacggcgcgtccgcgtccgccaatgccagcatctgtctgggttcaggtcgatgtggcagactccccgcatttaattgaacgcttcacagcacttttcgacgcgcatcatatgaacattgcggagctggtgagccgcacgcaacctgctgaaaatgaacgggctgcgcagttgcatattcagataaccgcccacagccccgcatctgcggacgcagcaaatattgagcaagcgttcaaagccctatgtacagaactcaatgcacaaggcagtattaacgtcgtcaattattcccaacatgatgaacaggatggagttaagtaatgaatccactgaaagccggtgatatcgcaccgaaatttagcttgccggatcaagacggagaacaagttaatttgaccgacttccagggacagcgtgttctggtttatttctacccgaaagccatgacccccggctgtaccgtacaggcctgcggcttacgcgataacatggatgagttgaaaaaagcgggcgttgatgtgctgggtatcagcaccgataaacccgaaaaactctcccgttttgcggaaaaagagctgcttaactttacgctcctgtctgatgaggaccaccaggtgtgcgaacaattcggcgtctggggtgaaaagtccttcatgggcaaaacctacgatggcattcatcgcatcagcttcctgattgacgctgatggcaaaatcgaacatgtctttgacgatttcaaaaccagcaatcaccacgacgttgtgctgaactggctgaaagaacacgcctgattactttgctccattccgtgctggctgcgcttgcggccagcatacctcacttctcgtgatcaagatcacattctcgctttcccctgcgacacgggtgtcgaatccattttttgctgaacgttaatgaccatcatttttgtaccgttcagaatccagttaatacataacttattgaatatattgagttaatcagaatggcatcctttatgcaatatgaaatgcaatgtttcatatcattttcaaggagccgacatgaaccgctttgtggtggccgaaccactgtggtgtacaggatgtaatacctgtctcgctgcctgtagcgacgtgcataaaacgcaaggtttacagcaacacccgcgcctggccctggcgaagacgagtacaatcactgcccctgtcgtgtgtcatcactgtgaggaagccccttgcctgcaggtctgcccggtcaatgccatctctcagagggatgatgcgatccaactcaacgaaagcctctgtattggctgcaagctttgcgccgtggtctgcccatttggcgcaatcagcgctagtggaagccgtccggtgaatgcccatgcgcaatatgtttttcaggctgaaggcagtctcaaagacggcgaagaaaacgcgccaacacaacatgctttgctgcgctgggaacctggtgtccagaccgtcgcggtgaaatgcgacctgtgtgatttcttgccagaaggtccggcctgcgttcgcgcttgcccgaatcaggcgttacggctgatcaccggtgatagcctgcaacgtcagatgaaagaaaaacagcgccttgccgcaagctggtttgccaatggcggggaggatcccctttccctcactcaggagcaacgctaatggatgccctgcaattattaacctggagcctgattctctatctgtttgctagtctggctagcctgtttttactcggtctggacagactggctattaagctttccggcatcacaagcctggtgggcggcgtgattggcatcatcagcggaattacgcaattacatgctggtgtaactttagtcgcccgttttgcccccccttttgaatttgccgatttaaccctgcgaatggatagcctcagcgcatttatggtgctggttatctccttgctggtggtggtttgttctctctatagtttgacttatatgcgcgaatacgagggcaaaggcgcggcggcgatgggcttctttatgaatattttcatcgcaagcatggttgccctgctggtgatggacaacgctttttggttcatcgtgctgtttgaaatgatgagcctgtcttcctggtttctggtcattgccaggcaggataaaacgagcatcaacgctggcatgctctacttttttatcgcccacgccggaagcgtgctgataatgatcgccttcttgctgatggggcgcgaaagcggcagcctcgattttgccagtttccgcacgcttagtctttctccggggctggcgagcgcggtgttcctgctggcctttttcggttttggcgcgaaagccgggatgatgccgttgcacagctggttgccgcgcgctcaccctgccgcaccaagccacgctagcgcgttgatgtctggcgtaatggtcaaaataggtattttcggcatcctgaaagtagcgatggatctgctggcgcaaacgggtttgcctctgtggtggggcattctggtgatggcgatcggcgcaatctccgcgctcctgggcgtgctatatgcgctggcggaacaggatatcaaacggctgctggcctggagtaccgtcgaaaacgtcggcattattttgctggcagtcggtgtggcgatggtcggtctgagtctgcacgacccgctgctcaccgtggttggactgctcggcgcactgtttcatctgctcaaccatgcgctgttcaaagggctgctatttctcggcgcgggagcgattattagccgtttgcatacccacgacatggaaaaaatgggggcactagcgaaacggatgccgtggacagccgcagcatgcctgattggttgcctcgcgataagcgccattcctccgctgaatggttttatcagcgaatggtacacctggcagagcctgttcagtctaagtcgtgtggaagccgtagcgctacaacttgcgggtcctattgctatggtaatgctggcagtcactggtgggctggcagtaatgtgcttcgtaaaaatgtacggtattactttctgtggtgcgccgcgcagtacacacgctgaagaggcacaggaagtgccaaatacgatgatcgtcgccatgctactgctcgcggcactctgcgtattaattgcgcttagtgccagttggctggcaccgaagataatgcatattgcccatgcgtttaccaatacccctcccgccactgtcgccagcggaatagcacttgtacccggcacgtttcatacacaggtcacccccagtttactgttgctgttactactggcgatgcctttgctgcctggcctttactggctgtggtgtcgtagccgccgcgcagcgtttcgtcgcacaggagatgcctgggcatgcggctacggctgggaaaatgcgatggccccgagtggcaatggcgtgatgcagccgctgcgtgtggtcttttctgcgctatttcgtctacgacaacagctcgaccctacgctgaggctaaataaaggtcttgcgcacgtcaccgccagggctcagagcacagaacccttctgggatgagcgggtgatccgccccatcgtgagcgccacccaacggctggccaaagaaatacagcatctgcaaagcggcgactttcgtctctattgcctgtatgtggtcgccgcactggttgtgctgctaatcgctattgccgtctaaggaaatcaccatgagacaaactctttgcgacggatatctggtcatttttgcgttagcacaggccgtgattctgctgatgctaaccccactttttacgggtatttcccggcagatacgcgcgcgtatgcactcccgccgcgggccggggatctggcaggattatcgcgatatccacaaactgtttaaacgccaggaagttgcgccgacatctagtggtctgatgttccgcctgatgccgtgggtattaatcagcagcatgctggtgctggcgatggccttaccactgtttattaccgtttccccttttgcgggcggcggcgatctgatcacccttatctatcttcttgccctgtttcgttttttctttgctctttccgggctggataccggaagtccgtttgcgggagtcggtgccagtcgcgagttgacgctcggcattctggtcgaaccaatgcttattctcagtctgctggtattggcgctgatagcaggttccacgcatatcgagatgatcagcaatacgctggcgatgggctggaacagcccgctaaccaccgtactggcgttactggcctgtggttttgcctgcttcattgagatgggaaaaattccctttgatgttgctgaagcagaacaggaattacaggaaggcccgctgaccgaatattccggtgccgggctggcgctagcgaaatgggggctggggctgaaacaggtcgtgatggcaagtctgtttgtggccctgtttctgccctttgggcgcgcgcaagaactttctctcgcctgcctgctgactagtcttgtcgttacgctgctcaaggttttgctgatttttgtactggccagtatcgcagaaaacacgctggcacgcgggcgttttttactcattcaccatgtgacctggcttggcttcagccttgctgcgcttgcatgggtcttctggttaaccggtctgtaaggagcactgacggaatatggaaaatcttgctctgacgacgttattgctgccttttatcggcgcactggtcgttagctttagcccacaacgtcgggccgccgaatggggggttttgttcgccgcgctgaccacgctgtgcatgttgagtctgatctccgcgttttatcaggccgataaagttgccgtcacgttgacgttggtcaacgtgggggatgtggcgttgtttggcctggtcattgatcgcgtgagtacgctgattctgtttgtggtggtgtttctcggtttgctggtcacgatctactccacgggttatctgacggataaaaatcgcgaacacccgcataacggcacgaatcgttattacgcatttttactggtgtttatcggcgcgatggcgggactggtactctccagcacgctgctcggtcagttgttgttttttgaaattacaggcggctgctcctgggcgttgatcagttattaccagagcgataaagcgcagcgtagtgcactaaaagcgttacttatcactcatatcggcagcttggggttgtatcttgccgccgccacgctgtttttgcagaccggaacgtttgcgcttagcgcgatgagcgagttacacggcgacgcacgttatctggtttatggcggcatcctgtttgccgcgtgggggaaaagcgcccagctaccgatgcaagcgtggctaccggacgcaatggaagcgccaacaccgatcagcgcctatctccacgccgcaagcatggtgaaagtgggcgtttacatttttgcccgcgctattatcgacggcggcaatatcccgcatgtgattggcggcgttggcatggtcatggcactggtcaccattctttatggctttctgatgtatttgccacagcaggatatgaagcggttgctagcctggagcaccatcactcaacttggctggatgttcttcggcttgagcctctccatcttcggcagccggctggcgctggagggcagcatcgcctacatcgtcaaccacgcgttcgctaaaagcctgtttttccttgtagcaggtgcgctgagttacagctgcggcacgcgcttgttgccgcgtctgcgtggcgtattgcacaccctgccgttgccaggcgtgggtttctgcgtggcagcgctggcgattaccggcgtgccgccgttcaacggcttcttcagtaaattcccgctgtttgctgccggttttgcgttgagtgtggagtactggatcctgctgcccgccatgattcttctgatgattgaaagcgtcgccagtttcgcctggtttattcgctggtttggtcgcgttgtgcctggcaaaccgagcgaggccgtcgccgatgccgcaccgctgccaggaagtatgcgcctggtgttgattgtactgattgtgatgagcctgatttccagcgtaatcgccgcgacctggttgcagtaaggagatgatgaatgaccggttctatgatcgtaaataatctggcgggactgatgatgctgacaagcctgtttgtgattagcgtcaaaagctatcgcctgagttgcggattttacgcctgccagagtctggtgctggtgtctattttcgccactctcagctgcctgttcgccgcagagcaactgctgatctggtccgccagcgcctttatcaccaaagtgctgctggtaccgttaatcatgacttacgctgcacgaaatattccccagaacatcccggaaaaagcgttattcggtccggcaatgatggcactgctcgcggcgttaattgtcctgctttgcgcatttgtcgttcagcccgtgaagctaccgatggctaccgggctgaaaccggcgctggcggtagcgttaggtcattttctgcttggcctgctgtgcattgtcagccagcgcaatatcctgcggcaaatttttggttactgcctgatggaaaacggctcccatctggtgctggcgcttcttgcctggcgagcaccggaactggtggaaataggtatcgctaccgacgccatcttcgccgtcattgtgatggtgttactggcaagaaaaatatggcgtacccacggcacgctggacgtgaacaacttgaccgcgctgaagggataatgagatgagttattctgtgatgttcgctttactcctgctcacgccgctgctttttagcctgctctgttttgcctgccggaaacggagactttctgcgactcgcacggtgaccgtattacatagcttagggatcacactgctgctgattctggcactctgggtggtccaaactgccgctgatgcaggagaaatattcgctgcgggactgtggcttcatattgatggtctgggcggtttgttcctcgccattcttggtgtgattggctttctcaccggtatttacagcattggctacatgcgtcatgaagtggcacacggcgagcttagtcccgttacgctgtgcgattactacggtttcttccatctgtttttgttcaccatgctgctggttgttaccagcaataacctgattgtgatgtgggcggcgatcgaagccaccaccttaagcagcgcgtttctggtaggcatttacggtcagcgtagtagcctggaagctgcatggaagtacatcattatttgtactgttggtgtcgcttttggtctgttcggtaccgtgctggtatacgccaacgccgccagcgttatgccgcaggcagaaatggcgatattctggagcgaggttcttaagcaaagctccttgcttgacccaacattaatgctgttggcctttgtgtttttgctaattggctttggtaccaaaaccgggctatttcccatgcacgcctggctgccggatgctcacagtgaagcgccgagtccggtcagcgccctgctctccgccgtattgctgaactgcgcgctgttggtgctgattcgctattacatcattatttgccaagccatcggcagcgatttccccaaccggttgttgctcatcttcggcatgttgagcgttgccgtggcggcatttttcattctggtacagcgggacattaagcgtctgctggcgtactccagcgtggagaacatggggctggtcgcggtggagctaggcattggcgggccgctgggaatttttgccgcgctgctgcacatcttaaaccacagtctggcaaaaacgctgctgttctgcggttccggcaatgtactgctcaagtacggcacgcgcgatctcaacgtcgtctgtgggatgctcaaaatcatgccatttaccgccgtgctgtttggcggcggtgcgctggcgctggcagggatgccgcccttcaacatttttcttagcgaatttatgaccattaccgccggactggcacgtaatcacctgctgattatcgtcctgctgttattgctgttaacgctggtgctggcgggcctggtacggatggctgcgcgggtgttaatggcgaaaccgccgcaggccgttaaccggggtgatctcggctggttgaccaccagcccaatggtgattctgctggtcatgatgctggcgatgggaacgcatattccacaacctgtcatcaggatcctggcgggcgcttccactatagtcctcagtgggacgcacgatctgcctgcacaacgtagcacctggcatgattttttgcctagtggcaccgcatctgttagcgagaaacacagtgaacgttaatagtagcagtaatcgtggcgaagcgattctcgccgccctgaaaacgcagttccccggcgcggtgctggatgaagagcgacaaacgcctgaacaggtcaccattacggtgaaaatcaatctgctgcctgacgttgtacagtatctttattatcaacatgatggctggcttccggtcctgtttggcaacgacgagcggacacttaacggtcattacgcggtttattatgcccttagtatggaaggggccgaaaaatgctggattgtggtgaaggcgctggtcgatgccgacagtcgggagtttccgagtgtcacaccgcgcgtccctgccgcggtctggggcgagcgagaaattcgcgatatgtacgggctgattccggttggcctgccggatcagcgtcgcctggtgttgcccgatgactggccggaagatatgcatccgctgcgcaaagatgcgatggattatcgactgcgccctgaaccgacgactgattccgaaacgtatccgtttatcaatgagggcaacagcgatgcgcgggtgatccctgtcggcccgctgcatatcacctccgatgaaccgggtcacttccgcttgtttgtggatggcgagcaaattgtcgatgctgattaccgcctgttttatgtccatcgcggcatggagaaactggcagaaacgcggatgggctacaacgaagtgaccttcttaagcgaccgcgtgtgtgggatttgcggttttgcccacagtgtggcctataccaatagcgttgaaaatgcactggggattgaggtgccgcaacgagcacatactattcgcagcattctgctggaagtcgaacggctacacagtcatttgcttaaccttggcctctcctgccatttcgttggttttgataccggctttatgcaatttttccgcgtgcgggaaaagagcatgacgatggcggaattgctgatcgggagccgtaaaacctacggtctgaatctgattggtggtgttcgccgcgatattctcaaagagcaacgtctgcaaacgctgaaactggtgcgcgagatgcgcgccgacgtgagcgagctggtagagatgctgcttgctacgccgaatatggaacaacgcactcagggcattggcattctcgaccgacaaatcgcccgtgatttgcgctttgatcacccctacgccgactacggcaatattccaaaaacactgtttacctttaccggcggcgatgttttctcccgcgtgatggtccgtgtcaaagagacgtttgatagcctggcaatgctggaatttgccctcgacaacatgccggataccccactgctgaccgaaggctttagctataaacctcacgcattcgcgctgggctttgttgaagcgccacgcggtgaagacgtgcactggagcatgctcggtgataaccaaaaattgttccgctggcgctgccgtgccgccacctacgccaactggccggtgttgcgttacatgctgcgcggcaataccgtttctgacgcaccgctgattatcggtagccttgatccctgctactcctgtaccgaccgtgtgacgctggtagatgtgcgcaagcgccagagtaaaaccgtgccgtataaagagatcgaacgctacggcattgatcgtaaccgtagcccgctgaagtaaggacagaagatgctgaagttactgaaaactattatgcgcgccggaaccgcgacggtgaaatatcccttcgcgccactggaggtcagccctggctttcgcggaaaaccggacctgatgcccagccaatgtattgcctgcggtgcctgcgcctgtgcttgtccggcaaatgcgctggctatccagaccgacgaccagcaaaatagccgcacctggcagctctatctggggcgttgtatttactgcggacgttgtgaagaagtgtgcccgaccagagccatccagcttaccaataactttgaactgaccgtcaccaataaagccgatctctatacccgcgcgacgttccatctacaacgttgcagccgttgcgaacgcccgtttgccccgcaaaaaaccatcgcactggctgctgaattgttagcacagcaacaaaatgcgccacaaaaccgcgaaatgttgtgggcgcaagcgagcgtctgcccggaatgcaaacaacgcgcgacgctgatcaacgacgatacagatgtactgctggtggctaaggagcagctatgagtccagtgcttacacaacatgtcagccagcccatcacgctggacgagcaaacgcaaaagatgaagcggcatttgctacaggatatccgtcgcagcgcttacgtttatcgcgtcgattgcggcggctgcaacgcctgtgaaatcgaaatttttgctgccattacaccagtattcgacgcagaacgttttggcattaaggttgttagtagtccgcgtcacgccgatattttgttatttactggcgcagtcacccgggcgatgcgtatgcctgcacttcgggcgtatgagtctgcccccgatcataaaatttgtgtttcctacggcgcgtgcggtgtcggcggcggtattttccacgatctctacagcgtctggggcggtagcgacaccattgtccccattgatgtttggatccccggctgcccgccaacaccggccgccaccattcacggtttcgccgtggcgctcggtttgctgcaacagaagattcacgctgtggattatcgcgatcccaccggggtgactatgcaaccgttgtggccgcagatcccgccaagtcagcgtatcgccattgagcgagaagcgcggcggctggcgggctatcgtcaggggcgagaaatttgcgatcggctcctgcgccatttaagcgacgatcctacaggaaatcgggttaacacctggttgcgcgatgccgacgatccacgtctcaatagtatcgttcagcaactctttcgcgtactccgggggttacatgactgaagagtgcggggaaattgttttctggacgctgcgaaaaaagtttgtcgccagtagcgacgagatgccggaacacagctctcaggtaatgtattacagcctagctatcggccatcacgttggcgtgattgattgtctgaatgtcgccttccgctgcccactgacggaatacgaagattggcttgcactggtcgaagaggagcaagcccgacgtaagatgctgggggtgatgacttttggtgagattgttattgacgccagccacaccgccctgttgacccgggcattcgcgccactggcggatgacgcgacgtctgtgtggcaggcgcgtagcattcaattcattcatctgttggatgaaattgtgcaggaaccggccatctatctgatggccagaaaaattgcgtgagaaggatttctcattaataaggactgttgatggctatgagtgacgaggcgatgtttgccccgccacaaggaataacaattgaagcggtaaacggaatgctcgcggagcggttagcacagaaacacggcaaggcgtctttattacgcgccttcatcccgctgccgccgccgttcagcccggtacaacttattgaactgcatgttctcaaaagcaacttctattaccgctaccatgatgatggcagcgatgtgacggcaacaacagagtatcagggcgagatggtcgattatagccgtcacgccgtccttctcggcagtagtggaatggcggagctacgctttattcgcacccacggcagtcgttttacttcccaggattgcacactgtttaactggctggcgcggataatcaccccggttctgcaaagttggctcaatgatgaagaacagcaggtggcgctgcgtttgctggagaaagatcgcgatcatcatcgggtactggttgatattactaatgcagtgctgagtcatcttgatctcgacgatctgatcgctgacgtcgctcgtgagatccatcattttttcggtctggctagtgtcagtatggtactgggcgatcatcgaaagaacgagaagttcagcctgtggtgcagcgatctttctgccagtcattgtgcgtgtctgccacgctgtatgcctggcgaaagtgtattgctgacacaaacgctacaaacccgacaaccgaccttgacgcaccgtgcagatgatctgtttctctggcaacgcgacccgttattactcttacttgcatctaacggctgcgaatctgcgctccttataccgcttacctttggcaaccatacaccgggtgcattgttgctggcgcatacctcttccactctctttagtgaggaaaactgccagctactacaacacatagccgatcgcatcgctattgccgttggcaatgccgatgcctggcgtagcatgaccgatttgcaggaaagtttgcagcaagaaaaccaccagcttagcgagcagctccttagcaatctgggcatcggtgacattatctatcaaagccaggcaatggaagacctgctccagcaggtagatattgtggcgaagagcgacagtacggtgttgatttgtggtgaaaccggaactggcaaagaggtgatcgccagagcgatccatcaacttagcccgcgacgcgacaagccgctggtcaaaatcaactgcgctgccatccccgccagtcttctggaaagtgagttattcggtcatgacaaaggggcgtttactggtgcgattaatacccatcgtggtcgttttgaaattgccgatggcggcacgttgtttctcgatgaaattggcgatctgccgttagaacttcagcctaaactgctgcgcgtattgcaggagcgggagattgagcgtctcggcgggagtagaacgatcccggtgaatgtcagagtcattgccgccaccaaccgtgatttgtggcaaatggttgaagatcgccagtttcgcagcgatctcttttatcgcctgaatgtcttcccactggaattgccgccgctacgcgaccgtccggaagatatccctcttttagcaaaacatttcacgcaaaaaatggcgcgccatatgaatcgcgcaattgacgccatcccgaccgaggcactacgccagttgatgagctgggattggccgggcaacgtgcgcgagctggaaaacgtgattgagcgggcggtactgttgactcgtggtaacagtctgaatttacatctaaatgtccgacaaagccgtttactgccgacgctaaatgaagatagtgcgcttcgcagtagtatggcgcagttactgcacccgacgacgccagagaatgacgaagaagaacgtcagcgcattgttcaggtattgcgagaaaccaatggcattgttgccgggccccgtggcgcagcgacgcgattagggatgaagcgcaccacgctgctgagtcgaatgcagcggctggggatcagcgttcgcgaggtgttgtaatctgcttttgcaggagtatgcatgagaaacaaactctctttcgacttgcagttgagcgccagaaaagcggcaatcgctgaacggattgccgcccataaaattgcccgcagtaaagtgagcgtctttttaatggcgatgtccgctggcgtgtttatggcgatcggatttactttttacctttccgttatcgccgatgccccgtctagtcaggcattaacccatctggtgggcggcctttgctttacactcggctttattttgctggcggtttgcggcaccagcctgttcaccagcagcgtaatgacggtgatggcaaaaagtcggggcgtcattagttggcgaacttggctgattaacgcacttctggtggcctgcggtaatctggcaggtattgcctgtttcagtttgttaatctggttttccgggctggtgatgagtgaaaacgcgatgtggggagtcgcggttttacactgcgccgagggcaaaatgcatcatacatttactgaatctgtcagcctcggcattatgtgcaatctgatggtttgcctggcgctgtggatgagttattgcgggcgtagcttatgcgacaaaatcgtcgccatgattttgcccatcaccctgtttgtcgccagtggctttgagcactgtatcgccaatttgtttgtgattccgttcgccattgccattcgccatttcgcccctccccccttctggcagctggcgcacagtagcgcagacaattttccggcactgacggtcagccattttattaccgccaatctgctcccggtgatgctgggtaatattatcggcggtgcggtgctggtgagtatgtgttatcgggctatttatttacgtcaggaaccctgaaaaatcagcccggcgaaacagttcgtcgggctgaagattattcttgcgcgatttgcccatcgggccaggcatgaatcacggctttgatcagcgtcgccaacggaatggcgaagaatacgccccagaatccccacaaaccaccgaagatcaccacgcttaaaataatcaccagcggatgcaggttaaccgcttcggagaacaacaccggcactaacaggttgccgtccagcgcctgaataatcagatacaccgcgaagcagctccagaattcagtacctgcgccaaactggaatagcgccacgccaaccaccggaatggtcaccacaaatgcgccaatgtacggaataagaacgctgaagccgaccagcactgccagcagcaggctatagttcagcccgaagagcaagaaccccagccaggtggcgatccccaccacgatcatctccagcactttgccgcggatatagttggtgatttgttgattcatctccttccacacctgtcctgccagcccacggttacgcggcagcacccggcgaacggcgttcagcatctgctctttgtctttcagcaggaagaagaccatcaatggcaccagcaccagatagacggctatggtcagcaaaccgaccaggctggcgagggaaattttcaccacgctatcgcccatggtcagcatccgactgcgcatattttcggccattgcatcaataatgcccgcgtccattaacgccggatagcggcgcggcaacgtggcggcaaagtcagaaagcttattgagcatccccggcatatcgcggattaagtagatgccctgttgccaggcgataggcagtaccacgaacgccatcagtagcaatataccgacgaaaaccaccaatacaatgctcgtcgcccagcggcgggagcagccaatagattgcagacgcacggttggccattccagcaaataggccagcacaatagccaccagcaacggagcaagcaggccactaaagaaaaagataatgccaaatccggcaactaaaataaccagcaaggcaatcgcttccgggtcgctaaaacggcggcgataccattgcatcaacatttcgagcataaagaccttccctgaacctcaagagcgggattgcgatccgcaattgtatcgaaatgtcacaaaaaagacttcgctttttatgacggattcaggaaactgaaaagtcatttgagtgggctaatcttcgccgttacactcaaaggcggcgcggtgggaacgatatttcacagtatcggtcaaatgactatctccagaaatacaggatagaggttatgttcaggcagttgaaaaaaaacctggttgcaaccctcattgctgctatgaccattggtcaggtagccccggcgtttgccgacagcgcagacaccttgccggatatgggaacctccgcaggaagcacgctttccattggtcaggaaatgcagatgggcgactattatgtccgccagctacgcggcagcgcgccgttaattaatgacccgctgttaacgcaatatattaatagcctggggatgcgtctggttagccatgccaatagcgttaagacaccgtttcatttttttctgatcaacaacgacgaaattaacgcctttgctttctttggcggcaacgtggtgctgcactctgccctgttccgttattccgataacgaaagtcaactggctagtgttatggcgcacgaaatctcccacgtcacccaacgtcacctggcgcgagcgatggaagatcagcagcgcagcgcgccgctgacctgggtcggcgcgttaggttctattttactggcgatggccagtccgcaggcggggatggcggcgctgaccggtacactggcgggaacgcgtcaggggatgatcagtttcacccagcaaaatgaacaggaagcggaccgcattggtattcaggtgctgcaacgcagcggattcgatccgcaggcgatgccaaccttcctcgaaaaattactcgatcaggcgcgttactccagccgcccgccggaaattttattgactcacccgttgccggaaagtcgtctggcagatgcccgcaaccgtgctaatcagatgcgcccgatggtggtgcagagcagcgaagatttctatctggcgaaagcgcgcacactggggatgtataattccggacgtaaccagctcaccagtgatttgctggatgaatgggcgaaaggaaacgttcgtcagcaacgagcagcacaatatggtcgtgctttacaggcgatggaagccaataaatacgacgaggcgcgtaaaacgctgcaaccgttactggcggcagaacctggcaacgcatggtatctcgatctggctactgatatcgatcttgggcaaaacaaagccaatgaggcgatcaatcgtctgaaaaatgcccgcgatttacgcaccaatccggtgttgcagctcaacctggcgaacgcttatttgcaaggcggtcaaccacaagaagcggccaatattctgaatcgctacacctttaataataaagatgacagcaacggctgggatttgctggcacaggcggaagccgcgctaaataaccgcgatcaggagctggctgcgcgagcagaaggttatgcgctcgccggacgactcgatcaggccattagcctgttgagtagcgccagtagccaggtgaaattaggcagcctgcaacaagcgcgttacgatgcgcgcatcgaccagttgcgccagctgcaggaacgctttaagccttataccaagatgtaattcgcattaaaggaagaacaatgaccaaacaggtaaaaatctaccataacccacgctgtagtaagagccgggaaacgctgaacctgctgaaagaaaacggcgtggagccagaagtggtgctctaccttgagacacccgccgatgcggcaacgctgcgcgatttgctgaaaatactggggatgaatagcgcccgtgaattgatgcgccagaaagaggatctttataaagaactgaacctggctgacagtagccttagcgaagaggcgctgattcaggcaatggtggataatccgaagctgatggagcgcccgattgtggtcgcgaatggcaaagcgcggattggtcgtccaccggagcaggtactggaaatcgtgggttaagatgtgctccatcgctagttgaagcacattgccggatgcgacgcttgccacgtcttatccggcctacgaatactatggattaacttcgcgtagttcggataaggcgttcgcgccgcatccgacaataaacaccttatttacaacttcagaatttctttcacaaacggaatggtcagcttacgttgcgcggtaatgctcgcacgatccaactgatccaacgtcataaatagcgtgcgcatttctctgtcgagccgcttcagcaagaaacgccccacatcttccggcagttcaaaaccacgcaaacgcgcgcgtaactgtagcgcctgcaacttatcttcatcagaaagtggctgcaatttgtagatctgcccccagtcgagtcggctcgcgagatccggtaatcccagattcaactgccgcggtggacgatcgccggtgatcaacaaccgtgttttgccgctttccagaattcgattgtagagatcgaaaatcgccatctcccacaactcatcgcctgcaatacactcaatgttgtcgatacagaccaggctcaaatgctccataccgtcgagcacttccggaacaaaccaggtgcgtttatccagcgggacatagcccaccgcatcgccacgctggctcaattccgcgcaagccgcgtgcagcagatggctgcgccccgcgccttcgcgtgcccagagatagatgtaaccgctatgttcctgacgcagcacgttttgcagcgcggccagtaaagaggagttatcccccggccagaaacttgcaaaggtttcgtcgtcaggaagataaagtggcaaagagagctgtgccggtgtgttcagagatacctcaaccaggatttcacaaaatcggctgaagtttaccacagaatcccatgatgtttgaaccgggcagcaacactgcccggtcggtacattatttgtctgttatatccgcgtcttctgcgtccagcaccacttcttcagggcgcagcacactgatcagtttgaagatcaaacttaagccgataccgacgatggtcgccagcgccataccttttaactccgccgcgccgatgtttaccttcgcgccactgacgccgatgatcaaaatcacggaagtcaggatcaggttctgtgctttgttgtaatccactttgctttcgatcaaaacacgaataccggaagcaccgatgacaccataaagcagcaggctaacgccgcccatcaccggcaatgggatcatctggatagcggcagccagtttaccgacgcaggaaagcaggatagcgaaaatcgccgccccgccgataacccaggtactgtaaacacgggtgatcgccatcacgccaatgttttctccgtaagtagtatttggcgtagagccaaagaagccggaaatcacggtgctcaagccattagcaaacatgctacggtgcagacctggatcgcgcagcagatcttttttgacgatattagccgttactaccaggtgccctacgtgttcggcaataaccactaacgccgctggcagaatagtcagaatggcaaaccactcgaagcgcggcgtatagagggttggcagcgcaaaccagtgagcattaataatcggcgtggtatcgacaattcccattgcgaaagagagcgcgtaccccaccagcacgccaattaaaatcgggataattgccaggaaaccacgaaacagcacggaacctaaaaccgtgaccgccagggtggtaatagagatgatgatggttttggagtctggcgtttgcccttcagccgggagtaaacccgccataccggcagctacgcccgccagctccagaccgatgacggcaacgattgcgcccattgccgcaggtggaaacagcacgtccagccagccggtccccgctttcttcacgataaaagaaaccaggcagaacagcacgccgcacataataaagccgcccagcgcgacttcataccctaacggcaacagtaacaataccggactaataaaggcaaagctggaaccaagataagccggaattttccctttacagatgaagagatacagcagcgttccaataccgttaaataacagtacagtcgccgggttaatatgaaataagacgggcaccaggacggttgcaccaaacatggcgaacaaatgttgcaaactaagcgggattgtctgtaaaagtggcggtctttcactcaccccgatagcacggcgcgtcatagtattatcctctgtattatgtgttataggcgctttactcaaaaaaaagccgactcttaaagtcggctttaattatttttattctttatttcgtaccaaagattttgtcaccggcatcgccgaggcccggaataatgtatccgtgctcgttcagtccctgatcaatgcttgcggtatacagttcgacgtccgggtgcgctttttccagcgcagcgataccttctggcgcagctaccagcaccagaactttgatgctgctgcagcccgcttttttcagcaggtcgatggtcgcgataacggaaccaccggttgccagcattgggtcaacgatcagcgccatacgctcatcgatgttagaaaccagtttctggaagtacggtaccggctccagcgtttcttcattacggtacataccgacaacgctgatgcgcgcgctcggaacgttttccagcacaccgtccatcataccaagacccgcacgcagaattggcacaacggtaattttcttacctttgatctggtcgatttctaccgggccgttccagccttcgatagttactttttccgtttcgaggtcggcggtcgcttcgtaagtcagcaggctacccacttcggaagcgagttcgcgaaagcgcttggtgctgatatcttgctcacgcatcagtcccagcttgtgtttgacgagtgggtgtttgacttccacgatcttcatactctttctcctttgaggggcagccacaaaaaaaatcgacggattatacctcctttcttcaaggcggcaatattcttttcgttgactttagtcaaaatgataacggtttgagataaagttattttatattcagatggttatgaaagaagattattccatccgaaaactaacctttaccctggcacaagtcttctttcgccgcgcgcctggggaaaagacgtgcaaaaaggttgtgtaaagcagtctcgcaaacgtttgctttccctgttagaattgcgccgaattttatttttctaccgcaagtaacgcgtggggacccaagcagtgaccgataaaacctctcttagctacaaagatgccggtgttgatattgacgcgggtaatgctctggttggaagaatcaaaggcgtagtgaagaaaacgcgtcgtccggaagtgatgggcggtctgggcggcttcggtgcgctgtgtgcattgccgcaaaaatatcgtgaacccgtgctggtttctggcactgacggcgtaggtaccaagctgcgtctggcaatggacttaaaacgtcacgacaccattggtattgatctggtcgccatgtgcgttaatgacctggtggtgcaaggtgcagagccgctgtttttcctcgactattacgcaaccggaaaactggatgttgataccgctagtgcggtgatcagcggcattgcggaaggttgtctgcaaagtggctgtagtctggtgggtggcgaaacggcagaaatgccggggatgtatcacggtgaggattacgatgtcgcgggtttctgcgttggcgtggtagaaaaaagtgaaatcatcgacggctctaaagtcagcgacggcgatgtgctgattgcactcggttccagcggtccacacagcaacggctatagcctggtgcgcaaaattcttgaagtcagcggttgtgatccgcaaaccaccgaacttgatggtaagccattagccgatcatctgctggcaccgacccgcatttacgtgaagagtgtgctggagttgattgaaaaggtcgatgtgcatgccattgcgcacctgaccggcggcggcttctgggaaaacattccgcgcgtattgccagataatactcaggcagtgattgatgaatcttcctggcagtggccggaagtgttcaactggctgcaaacggcaggtaacgttgagcaccatgaaatgtatcgcaccttcaactgcggcgtcgggatgattattgccctgcctgctccggaagtggacaaagccctcgccctgctcaatgccaacggtgaaaacgcgtggaaaatcggtatcatcaaagcctctgattccgaacaacgcgtggttatcgaataatgaatattgtggtgcttatttccggcaacggaagtaatttacaggcaattattgacgcctgtaaaaccaacaaaattaaaggcaccgtacgggcagttttcagcaataaggccgacgcgttcggccttgaacgcgcccgccaggcgggtattgcaacgcatacgctcatcgccagcgcgtttgacagtcgtgaagcctatgaccgggagttgattcatgaaatcgacatgtacgcacccgatgtggtcgtgctggctggttttatgcgcattctcagcccggcgtttgtctcccactatgccgggcgtttgctgaacattcacccttctctgctgccgaaatatcccggattacacacccatcgtcaggcgctggaaaatggcgatgaagagcacggtacaagcgtgcatttcgtcaccgatgaactggacggtggcccggttattttacaggcgaaagtcccggtatttgctggtgatagcgaagatgacatcaccgcccgcgtgcaaacccaggaacacgccatttatccactggtgattagctggtttgccgatggtcgtctgaaaatgcacgaaaacgccgcgtggctggatggtcaacgtctgccgccgcagggctacgctgccgacgagtaatacccccgtaattaaagcgccagctctgccgctggcgtttttcaattcacctgtaaatcgcaagctccagcagtttttttcccccttttctggcatagttggacatctgccaatattgctcgccataatatccaggcagtgtcccgtgaataaaacggagtaaaagtggtaatgggtcaggaaaagctatacatcgaaaaagagctcagttggttaagcttcaatgaacgcgtgcttcaggaagcggcggacaaatctaacccgctgattgaaaggatgcgtttcctggggatctattccaataaccttgatgagttctataaagtccgcttcgctgaactgaagcgacgcatcattattagcgaagaacaaggctccaactctcattcccgccatttactgggcaaaattcagtcccgggtgctgaaagccgatcaggaattcgacggcctctacaacgagctattgctggagatggcgcgcaaccagatcttcctgattaatgaacgccagctctccgtcaatcaacaaaactggctgcgtcattattttaagcagtatctgcgtcagcacattacgccgattttaatcaatcctgacactgacttagtgcagttcctgaaagatgattacacctatctggcggtggaaattatccgtggcgataccatccgttacgcgctgctggagatcccaagtgataaagtgccgcgctttgtgaatttaccgccagaagcgccgcgtcgacgcaagccgatgattcttctggataacattctgcgttactgccttgatgatattttcaaaggcttctttgattatgacgcgctgaatgcctatagtatgaagatgacccgcgatgccgaatacgatttagtgcatgagatggaagccagcctgatggagttgatgtcttccagtctcaagcagcgtttaactgctgagccggtgcgttttgtttatcagcgcgatatgcccaatgcgctggttgaagtgttacgcgaaaaactgactatttcccgctacgactccatcgtccccggcggtcgttatcataattttaaagactttattaatttccccaatgtcggcaaagccaatctggtgaacaaaccactgccgcgtttacgccatatttggtttgataaagcccagttccgcaatggttttgatgccattcgcgaacgcgatgtgttgctctattatccttatcacacctttgagcatgtgctggaactgctgcgtcaggctagcttcgacccgagcgtactggcgattaaaattaacatttaccgcgtggcgaaagatagtcgcatcatcgacagcatgatccacgccgcacataacggtaagaaagtcaccgtggtggttgagttacaggcgcgtttcgacgaagaagccaacattcactgggcgaagcgcctgaccgaagcaggcgtgcacgttatcttctctgcgccggggctgaaaattcacgccaaactgttcctgattagtcgtaaagaaaacggtgaagtggtgcgttatgcacacatcgggaccgggaactttaacgaaaaaaccgcgcgtctttatactgactatagcttgctgaccgccgatgcgcgcatcaccaacgaagtacggcgggtatttaactttattgaaaacccataccgtccggtgacatttgattatttaatggtaagcccgcaaaactcccgccgcctattgtatgaaatggtggaccgcgagatcgccaacgcgcagcaagggctgcccagtggtatcaccctgaagctaaataaccttgtcgataaaggcctggttgatcgtctgtatgcggcctccagctccggcgtaccggttaatctgctggttcgcggaatgtgtagcctgatccccaatctggaaggcattagcgacaacattcgtgccatcagtattgttgaccgttaccttgaacatgaccgggtttatatttttgaaaatggcggcgataaaaaggtctacctttcttccgccgactggatgacgcgcaatattgattatcgtattgaagtggcgacgccgctgctcgatccgcgcctgaagcagcgggtactggacatcatcgacatattgttcagcgatacggtcaaagcacgttatatcgataaagaactcagtaatcgctacgttccccgcggcaatcgccgcaaagtacgggcgcagttggcgatttatgactacatcaaaagtctcgaacaacctgaataaccctatgccaatacacgataaatcccctcgtccgcaggagtttgctgcggtcgatcttggtagtaacagttttcacatggtcatagcccgtgtggtagatggtgccatgcagattattggccgcctgaaacagcgggtgcatctggcggacggcctggggccagataatatgttgagtgaagaggcaatgacgcgcggtttaaactgtctgagcctgtttgccgaacggctacaagggttttctcctgccagcgtctgtatagttggtacccatacgctgcgtcaggcgctgaacgccactgactttctgaaacgcgcggaaaaggtcattccctacccgattgaaattatttccggtaatgaagaagcccgtctgatttttatgggcgtggaacatacccaaccggaaaaaggtcgcaaactggttattgatattggcggcggatctacggaactggtgattggtgaaaatttcgaacctattctcgttgaaagccgccggatgggttgtgtcagctttgcccagctttattttcctggcggggtcatcaataaagagaattttcagcgcgctcgcatggcggcagcacaaaaactggaaactttaacctggcaattccgtattcagggctggaacgttgcaatgggcgcttccggtaccataaaagccgcccatgaagtgttaatggaaatgggcgagaaagacgggataattaccccggaacgtctggaaaaactggtaaaagaagttttacgtcaccgtaatttcgcaagcctgagtttaccgggtctttccgaagagcggaaaacagtcttcgttccgggactggcgattttatgcggtgtgtttgatgctttagccatccgtgaactgcgcctttctgacggggcgttacgcgaaggcgtactgtatgaaatggaaggacgtttccgtcatcaggatgtgcgtagtcgcaccgccagcagcctcgccaaccagtatcacatcgacagcgaacaggcccgacgggtgctggataccactatgcaaatgtacgaacagtggcgggaacagcaaccgaagctggcgcatccgcaactggaggcgctactgcgatgggccgccatgctgcatgaggtcgggttgaatatcaaccacagcggtttgcatcgccactccgcttatattctgcaaaacagtgacttgccgggttttaatcaggaacagcagctgatgatggcgacactggtgcgctatcaccgtaaagcgattaagctcgacgatctaccgcgctttaccttgtttaagaagaaacagttcctgccactgatacagctattgcgccttggcgtattactcaacaatcaacgtcaggcaaccaccacaccgccaacattgacgctgattactgatgacagtcactggacactgcgtttcccgcatgactggtttagtcagaatgcgctggtactgcttgatctggaaaaggagcaagaatactgggaaggcgtggctggctggcggttgaaaattgaagaagaaagtacaccagaaatcgccgcttaatactttgcgggccgacgagaaatgtcggcccgcattattcaggcactttcgcgaatgggttcgatttcattcagcgtatcaattaacggctgcggcttaccaataagataaccctgcatataatcgatccccaaagagagcaccgcctcgcggatctcttcgttttcaacgtactctgccactaccagcattttcttcattcgcgccaggtggcaaatgcttgccactatctgataatccagactattactcacaatattgcggataaaactgccgtcaattttaagcagatcggcattcacatttttaagccgcgcatagctggcgtagccggtgccgaaatcatcaatcgcaatctggcagcctaattcctgaagatgctgcaaggtgatttgcgcctgcttaacattggtcagagcattactttcggtgacttcaaaaataagttgccacgcttcaatctgatatttagccagcaactgactgacttcaacaggaaaacgagcctgacatacgctggttggagacagattaatagcaaaacggtgagcgggcatcttcgctctgttttcagccataaattgcagcgtatgctcaatgacccacatgtcgatactgctgcttaaaccaaattcgtgcgcgaccggcaagaagctatcggggctgatcagttcatcattctcacctttcatgcgcagaagaatttcatggtaaacatcaccacgcataccggtaatcggctgggccatcaggaaaaaatggttgtgttccagcgcctgctgtagtcgattcatcatcgcgactttatctttcaattcgcgttgcaaatacattgccccgcgacgctgcatattttccggggcgttggtcacgatggaaagttcggcgaccgtatttagctctcccagcagcaggtagatatgattcactgggctgcgcacatagcagtaactgacgccaatctgcggttgcatcggcatgccatcccaaaagaaacgaaattgcttgagatggctatccagtgcggtaatgcgctcctggtggctttctgtattcagtcgcagcgcgagatcgttaccgctaagctgataaacatcttcacccggttccagcaagggactcagccagtgagaaagtttttgcttgtattgaatccgcagcatgatgccatagttcttaaccagcatttccatgccagggatgcgtaaataacaaagcgcagaccagggggcatcacgcaacgcgcgattcagggcgcgaacatttggcagatgaaccaccgggtccacatacgcaagccgctgaatgcgtctgactaccgctctctgacgggttgccagtacagccatataattgacaataaaagagaataccagataactggaggaggttatggtcagctgcgtggtatagccaggataaatgggaatgtaattttgatagctgtggatgctgatcatcaacacgaccgcccagagcaggctaatcagcttataaccatagcgcatcgctccccacatcatcaggggcagcaataaactcaaggtataattggtgctaaaaattgtgcttttttcatttaacggcatgcataacagcaacaataaagcacctaatgccagtagccagagcgcgaactcttttttggtgactttggcatcaacctgctgttttaattggctataatagctacgtaaataaaatggatttcgcactacccgaatgatgaagtagcacagcgggacaccgatcagattacccaccagtaaggcctgataattgattaaagtcccgaggttaaaaggcatgacaccgaccagattttctctgctcgccagtaatcctacaaatgcagcaaactggaaaagtatcagaaacagcgttgcaggaaacacaatctgccagaatatacgctgggaaattaaacgggtatcaccatgactaacgttgttacgccggggagtaaagaccctgtaaccgccccaacagagaatgataatgataataaaattagccgttaaacttagcgtttcgtaaaaacccagctctgcatatttgcggacaaaaatccctaaggcgatccctggcaatgccgcccagctgaaaaacatcatcatgctgatcatcagtgccagaggcagataaaagagaaaaacctcaccggaagaaatatgcgcgaaagtattaatgtgggcgaaaatgggcaagattaaagaaggcaggaacagcggaagcccccaccatttatcacgtatttttatataagttgcattcagtttcatagatgctcagcagaatcccccacatcctgaaggaggtgtattcagacaggcatcccacctgacttcgaatgatgattattcatcactatagagagcattgattctaagtgtcatatgaaagtaccaattgatatatatcaaacaaaataaccctgattaatgaattattacgtttatcatgttaattcatcattattacatcatcattgtaaataattaaattaacttccataacattaaaatatgtatccactgacgcttttttacataacgaagaattgaccattttgtcctgttgtgccttaatgtaagtaccgtccacagcgtgggacatacttcaaggaaccttttgtgagtcaggcaaccagtatgcgaaaacgacaccgatttaacagtcgcatgacccgtatcgtactgctcatcagctttatcttcttctttggccgttttatctacagctccgtcggtgcctggcagcaccatcagagcaaaaaagaagctcagcaatccacactctccgtcgaaagtccggtacaacgttaacggttaccttctccactttcacagaacataacggcacttcgctgtcggatgcttttgctgtttgggattatcaaagcggcagatattctttcatcttaaattttacgtctttatcctgactgatgtttatcctgtttggctgcgaaataaatataaaattaatatatatgttgtaatgatatatttttataaattattccctgcgtgaattttaataaatttaatctatccctttatacgcaatacatttactttcctcttttgatgatcttaaatgtcttatttttcgtaatgtgtataacaaggaatagtgatgaaatttaaaaaatgtcttctgcctgtggcaatgttagcgagtttcactctggcaggatgccagagtaatgctgacgatcatgctgccgatgtttatcaaaccgatcaactgaataccaaacaagaaactaaaaccgttaatattatttccattcttcccgcaaaagttgccgtagacaactcccaaaataaacggaacgcacaagccttcggcgcgcttattggcgcagtcgctggcggtgttatcggccacaacgtcgggtctggcagcaattccggaacgacggcaggtgcagttggcggcggagctgtaggcgcggcagcgggttctatggtgaatgataaaaccttagtggaaggtgtttctttaacctataaggaaggcaccaaagtgtatacctctacccaggtgggtaaagagtgccagtttacgacaggtttagccgttgttattaccacgacgtataacgaaacgcgtattcagccaaataccaaatgtcctgaaaagagctaataatcaggaggagtcatgaagaaagtttttctttgcgccatcttagcctccttaagctatccggctatcgccagtagtttgcaggatcaactctctgctgtcgcagaagcggaacagcaaggtaaaaatgaagagcaaaggcagcatgacgaatgggtcgcggagcgcaacagggaaatccagcaagagaagcaacgtcgcgcaaatgcccaggccgccgctaacaaaagagcggcaacggcagcggcaaataagaaagctcgtcaggataaactggacgccgaagcctctgcggacaaaaaacgcgatcaaagttatgaagatgagctacgcagcttagagattcagaaacaaaaactggcgctggcgaaagaagaagcccgcgttaagcgagaaaacgaatttatcgatcaggaactgaagcacaaagctgcgcaaaccgatgtggtgcaatctgaagctgacgccaacagaaatatgactgaaggcggtcgcgatctgatgaaaagcgtgggcaaagcagaagagaacaaaagcgacagctggtttaattaatcgatgttagtaacttcaatcctataattcttgaagataaaaaaccctctgtagtaacagagggttttgttcattcatagtgcagggtcaaatcattcccactcaatggtagctggcggcttgccgctgatgtcatacaccacgcgggaaataccgttcacttcattgataatgcggttggaaacgcgaccgaggaaatcgtacggcagatgcgcccagtgtgcggtcataaagtcgatggtttcgacagcacgcagagagacaacccagtcatacttacgaccatcgcccattacgccaacggaacgtaccggcaggaacacagtgaacgcctggctgactttgtcgtacaggtccgctttacgcagttcttcaatgaagatggcgtcagcacggcgcagcaggtcacagtactctttcttcacttcacccagaacacgaacgccaaggcctggtcccgggaacgggtgacggtacagcatgtcgtacggcaggcccagctccagaccaatcttacgcacttcgtctttgaacagctctttcagcggttcaaccaggcccatcttcatctctttcggcaggccgcccacgttgtggtgagatttgatgacgtgtgctttaccggttgcagacgccgcagattcgataacgtcagggtagatggtgccctgcgccagccacttcacgtcttccagtttcagcgcttcttcatcgaatacttcaacgaaaacgcgaccgatgattttacgttttgcttccggatcgttttcgccagccagcgcactcaggaagcgatcttctgccggtacgtgaacaatgttaagaccaaagtgatcgccaaacatatccagaacctgctctgcttcgttgaggcgcagcaggccgttgtcgacgaatacgcaagtcaggtttttaccgatagcgcggtgcagcagcattgcggttacggaggaatccacaccaccagagaggccgaggatgactttatcgtcgcctacctgctcgcggatgcgagctacagcatcgtcgataattttcgctggcgtccacagggcttcacactggcagatatcacgcacaaaacgctccagcatgcgcataccctggcgggtatgagtcacttccgggtggaactgtacgccatagaagcgtttttcttcgttagccataatggcaaacgggcagctttcggtgctggctacggtgatgaagtcggacggaatagcggtaactttatcgccgtggctcatccagacatcgagcagcggtttaccgtctgcggtcagcgcatcttcgataccgcgaaccagtgcgctgtcgtttacgacttcaacctgcgcgtagccaaattcacgttcgttagaggcttcaacgtgaccgcccaactgcattgccatggtctgcatgccatagcaaacgccgaataccggtacgcctgcttcaaagacatactgcggcgcacgcggactgttttcttcagtagtactttccgggccgccggaaagaataatgccgcttggattgaagtcacgaatttgtgcttctgtcacatcccacgcccacagttcgcagtaaacacccagctcacgcacgcggcgcgcaaccagttgagtgtactgagaaccgaagtccagaatgaggatgcgatgcttatgaatgttttccgtcattgacgcttattccgaggcaagtgaaacagataatataaatcgcccgacatgaagtcgggcgaagagaatcaggagcccagacggtagttcggggactctttagtaatggtcacgtcgtgaacgtggctttcctgaatgcccgcaccgctgatacgtacaaactccgctttagtacgcagttcgtcgatagtaccacagccggtcagacccatacaggagcgcaggccgcccatctgctggtgaatgatctctttcaggcgacctttataggctacgcgaccttcgataccttccggcaccagtttgtcggcagcgttatcgctctggaaataacggtcagaggaacctttggacatcgcgcccagggaacccataccacggtaagatttgtaagaacggccctggtagagttcgatttcacccggagattcttcagtacccgccagcatggaacctaccatcaccgcgcttgcgccagcggcgatagctttggcgatgtcgccggagaagcgaataccgccatcagcgataaccggaataccggtgccttccagggcttctactgcgtcagcaacagcggtaatctgcggaacaccgacgccagtcacgatacgagttgtacagatagagccagggccaatgccgactttaaccgcactgcaaccagcttctgccagagcgcgtgcacctgcagctgttgccacgttgccgccgataatttgcagatccggatatttagcacgggtttcacggatacgttgcagtacaccttcactgtgaccgtgggaggagtcgatcagcagaacgtcaacgcctgcggcaaccagcgcgtcaacacgctcttcgttacccgcacctgcgccaaccgctgcaccaacacgcagacggccttgctcgtctttacaggcgttcggtttacgttccgctttctggaagtctttcacggtgatcatgccgatcaggtggaattcgtcatcaaccaccagcgctttttcaacgcgtttttcgtgcatttttgccagcaccacttcacgggcttcaccttcacgcacggtgaccagacgctctttcggcgtcatgtaaacgctaaccggctggttcaggtcggtaacaaaacgcacgtcacgaccggtgataatacccaccagttcgttttcttcggtaacgaccggatagcccgcaaaaccgttacgctcggtcagttctttcacttcgcgcagcgtcgtggttggcagaacagtctgcggatcagtcaccacaccagattcgtgttttttcacacggcgaacttcttctgcctggcgttcaatggacatgtttttgtggataaagccgataccgccttcctgagccagagcaatagccaggcgcgcttccgttacggtatccattgctgcggaaagcatagggatattcagacgaatagttttcgtcagctgggtgctgaggtcagcagtattcggcagaacggtagagtgagcaggaacgaggagaacgtcgtcaaacgtcagagcttctttagcgatacgtagcatgggcaatatctcgaccagagtggttaataaatattgccgcggcattatacagagcgtaaccgattgcatctacccctttttgcaaaaaatgcttgctatccccgaagggcgggttactatcgactgaataacctgctgatttagaatttgatctcgctcacatgttaccttctcaatcccctgcaatttttaccgttagtcgcctgaatcaaacggttcgtctgctgcttgagcatgagatgggacaggtttggatcagcggcgaaatttctaatttcacgcaaccagcttccggtcactggtactttacactcaaagacgacaccgcccaggtacgctgcgcgatgttccgcaacagcaaccgccgggtgaccttccgcccacagcatgggcaacaagttttagttcgcgccaatattacgctctacgagccgcgcggcgactaccagataatcgttgagagtatgcagccggccggtgaagggctgctgcaacagaagtacgaacagctcaaagcgaagttgcaggctgaaggtttgttcgatcagcaatacaaaaaaccacttccctcccctgcgcattgcgttggtgtgatcaccagtaaaaccggtgctgcgctacatgatattttgcatgtgttaaaacgtcgcgatccttctctgccggtgatcatctaccctgccgccgttcagggcgatgacgcgccggggcaaattgttcgcgccattgaactggcgaatcagcgcaatgagtgcgacgtattgatcgtcgggcgcggcggcggtagcctggaagatttatggagttttaacgacgaacgcgtagcgcgggcgatttttaccagccgcattccggttgtcagcgccgtcgggcatgagacggatgtgaccattgccgattttgttgccgatctgcgtgcgccaacgccgtctgccgccgctgaagtagtgagccgtaatcagcaagagttactgcgccaggtgcaaagcacccgtcaacggctggagatggcgatggattattatctcgccaaccgcacacgtcgctttacgcaaattcatcaccgattacagcaacagcatccgcagctccggctggcacgccagcaaaccatgcttgagcgcctgcaaaagcgaatgagctttgcgctggaaaatcaacttaagcgtaccgggcaacagcagcagcggttaacacagcggctgaatcagcaaaatccacagccgaagattcatcgcgcgcaaacgcgcattcagcaactggaatatcgtttagcagaaaccctgcgcgcacagcttagcgccacgcgtgaacgtttcggtaatgcagtaacgcacctcgaagccgtaagcccactgagtacgctggcgcgtggatacagcgttactactgctactgacggcaatgtactgaaaaaagtgaagcaagttaaagcgggtgaaatgctaaccacacgtctggaagacggctggatagaaagtgaagtaaaaaacatccagccagtaaaaaaaagccgtaaaaaggtgcattaagccagcacgaattcaacgcgttttttgcttatcaagccatgcccgtgctgacagaagtaatctactgcaccacaggcttttaacacctgcaacggttgatggcagtctggacaaagagctttcatttcaataaattccccgcaggatcggcaacgcgcatggccgttatcctgatcaagcacatgctgacattgtggacaatgcagttccatatgaattcctccggtagccattccctctacattcatagagggaatggcagataaaatacttacggataattatttatttttcttgatgtgcttcatcagacgcttacgtttacgcatctgggttggcgtcagggtgttacgcttattcgcatacgggttttccccttctttgaactgaatacgaatcgggcttcccattacgtccaggcttttgcggaagtagttcatcaagtagcgcttgtaggaatcaggcaggtctttcacctgattaccgtgaatcaccacaatcggcgggttataaccaccggcgtgggcatatttcagcttcacacgacgaccgcgtaccagcggcggttggtgatcttcaacagccatcgtcatgatgcgcgtcagcatagaggtccccacacgacgggtggagctgtcatacgcttcacgtacactttcaaacaagttaccaacaccactgccgtgcaaggcagagataaagtgcacacgagcaaaatcgataaagcccagacggaagtccagcgtttctttcacctgctctttcacttcctgactcaggccatcccacttattcaccacaatgacaagactgcgcccactattgagaataaagcccagcaggctgagatcctgatcggaaataccttcgcgcgcatcaatcactaacatcaccacgttggcgtcttcaatggcctgcaacgttttgattacggagaatttctctacagcatcggtgattttgccgcgtttacgtacgccagcggtgtcaatgagcacatactcacgtccatcgcgttccattgggatgtagatgctgtcacgcgtcgtgccaggcatgtcgtaaacaacaacgcgctcttcaccaagaatacggttagtgagtgtagacttacctacgttcggacgacccacaatcgccagtttgatcggcagactttgcgggtcgaagtcgtcttcctcttcttcttcgccgttctcttccgcttcaaattgcgcccagtattcagcgtcttcgtcgacttcctcttgcggtgcgagatcttccatccacggcagcagcacatgctccagcagacttaatacgccacgaccgtgagacgcggcgatcgggtagatttcacctaaaccaaggctgtagaaatcaaccactgcctgatcgggatccagaccgtcagttttgtttgccaccaggaaggtcggtttttcacgggagcgcagatgtttggcaatcgcttcatctgccggcatcaggcccgcgcgcgcatccaccataaacagtacgacgtccgcttcttcaatcgccagcaggctttgttccgccatgcgggtttctacaccgtcttctgtgccatcaatcccgccggtatcaatacagataaactcacggccttcaatttccgcacgaccgtacttacggtcacgagtcagacccgggaaatccgcaaccagcgcatctcgggtgcgagttagacggttaaataacgtggattttcctacgttagggcgcccgacaagcgcgaccacaggtaccatgtttaaagcctcatttttataaatcatcagacaacgcacgctatattcgcgtcgttgttaaaaacaggaaaacggcccctgtccaggagccgttttcaaagtgaacgacagagacgattaacgtgtaatagagtacacggttccgtcttttgcctggatcagcagtttgccgtcagcggcaaccggttcagtctggaaaccggaactatcaactttttgctgggcaacgaaacgaccatcttcgacgttaatccagtgcagataaccttcactgtcaccgaccaccaggttgccattatacagcaccggagaagtcagcaggcgatgcagcagatcgctttgtgtccacagcgtaacgccgccatcaatggtcaacgccatcacccggtcattttgatcgaccagatagatgcgattgccgtcgacgatgaaatcattcacgctacccagttcgcgtttccacataatctgaccactgcgcagatcaagcgccgtcaggttaccattataggccagcgcgaaaacaacgccgttaacaacgacgggagtcgtgtcaacatcgctcagacggtcaatttcggtagaaccggtcgcctgggaaatacgctgctgccaaatcatctggccctgttccatcagcactgcgctgacgcgaccattatcgccccccacgacggccgcaccaaaagccgttgtcggcgcagactcgccacgcaaagagaggctaggcatatcgaggttaactgtccatttgacagcgccgtcagcttcgttcagcgcttgtaactgaccgttactggtgtggattaacaccagaccgtcgctgaccaccgggcggctaagtgcttcacccgcgactttagtttgccatgccacagtaccatcgctggtattcagcgcgtaaacctgcgccttttcgctgccaatgtagacatgcccaccagacacggtcacaccgccagaaagtaatgcaggctctttagagaaccagccatctttctcggccaggctgacagaccagatttctttgccatcatccgcattcagcgcttttactaaaccagcgcggtccgctgcatagacaacgttgtccgccagtgccggatgaagattggaatagaagttgccaatgccgctaccaacggaagtgctccacgccgtggtcggcgtaaactggttttcaacggttggcaatggggacatctttaccacatcttcttcgctgttaaacaggctacagccgcttaaaagggtaacggaaagcagtcctggcagcagtaatttacgcaattgcatcgggtccctctcagatggacaaattattaattttcatctgcatcatttcgctcagtgccggagtaacatcgcttttcacgcctgcttcccatgcactacgcgcaccttgcttatcacctttgctcagcaatgcttcaccacgcaggtcggcaacaatggcagcccacccttcacctttgatggtatcaagggttttcagcgcggcatcagcctgcttgagctgtacctgaacgcgagcaagacgcagatttatcacggctttgagattttcatcgctcgtgtctgccagcccctgttgtaactgggcggcagctttctctagttcatttttgtcaacaaattgctgcgcaagttccaaagaagccagcgcaccataagtatttttattttcagcagcaaatttttccgccgccgggatgctatccggtttgccttcgctcactgcggtaaccgcattttgataggcaagagaagcggagcgtgcagaatcaacctgatggctgttccagtagcgccagccaatcagtgcgccaacgcccaaaatcaccccaacagccagtgctttgccattttcagcaaaaaagcgtttaaccgcttctacctggtcgttttcgttctcgtaaatttccacgctgtccttctccttccttaacccagtaacgtgcgcaaatgcgcggctacgctatcctgcgcaactgccgtttgctcaccagagcgcaaatccttcactactgctgtgccgttagccacttcagactcacccagcaccacagcaacgcgggcaccccatttatcagcacgggcaaactgtttcttaaagttgccgccgccgtggttggtcatcaatttcacgcccggtaattcatcacgcagacgctcagctaatgccatagccgcagattgtgtatcagcaccactagccaccaggtatatatcgacaacaggatcggctttaaattccggattaacggcctgtactaacaatacaagacgttcgaggcccatagcaaaaccgacagccggtgttgcacgaccgcccagttgttccacaagaccgtcataacgaccgcctgcacacacggtgccctgggagccgagactgttagtcacccactcgaaaacggtacggttgtagtaatccagaccacgcaccagacgctggtttacggtgtaagcgatccccgcgctctccagcagtttgcacagaccggcaaaatgctcacgagattcctcgtccagatagtcacctaatgccggagcgtcgttgagaagcgcctgcacttccggatttttactatccagcacgcgcagcgggttagtgtacatgcggcgtttgcagtcttcgtccagcttttctttatgctgctcaaggaatgccaccagcgcatcgcggtaattggcgcgtgcttccaggctaccgatagagttcagctcaagagttacgtgctcggaaatacccagcgcgcgccaccagcgggcagtgagcataatcagttcagcgtcgatatccggaccttgcagaccgaaaacttcgcagcccaactgatggaactgacgataacgccctttctgcggacgctcgtgacggaacatcggcccgatataccacagacgctgttcctgattgtacagaagaccatgctcgatgccggcgcgtacacagcccgccgtcccttcagggcgcagagtcaggctgtcgccattgcgatcctcaaaggtgtacatctctttttcaaccacgtcggtgacttcaccaatcgcacgtttgaatagcggggtctgctctacaatcggcaagcggatttcactgtaaccgtagctgccgagcacgtttttcagtgtgccttcaatgcgctgccagatggccgtttcgccaggcaggtaatcgttcatgccgcgaatggcttgaatgttttttgccacgtttattctctttctgaatataaaaatgaaccctcaacgcttccctcaatgtttcgggagccatgcgggttcaatcatacacgggaagcgaggcgcttcccatcacgttattatttttcaacctgctgaacgtcaattcgacgcgcttcgtccagctgactggctttcgcacgaatgcgtgcttccagctggtcgatcatatcgttgttgtccagacggtctttgcgcacgccatcttcatagaggccgcttttcttgttgccgccggtgacgccgagtgtagaaaccagcgcctcacctgggccattcaccacgcagccgataatgctaacgtccatcggagtgatgatatcttccaggcgttgctccagcgcgttaaccgtaccgataacatcaaattcctgacggctacaggtcgggcaggcgatgaagttgatccctcggctacggatacgcaggcttttcaaaatatcgaaaccgactttgatctcttcgaccggatcggccgccaggcttacgcgcagcgtgtcgccgatgccttcagacagcagcagacctaaaccaatggcggattttactgccccgctgcgcgcaccaccggcttcggtgatccccagatgcaacggctgatcgatctgttttgccagcaaacgataagactcaacagcgaggaagacgtcagacgctttcacgctgactttgaactgatcgaagttcaggcgatcgagatgatcaacatgacgcatggcagattccagcaacgcctgcggcgtcggttcgccatacttttcttgcagatctttttccaggcttccggcgttaacgccaatacggatcggaatgtttttatcgcgcgcacagtcaaccaccatgcgaatacgctcttcattaccgatattgccagggttaatacgcagacaatcgacgccgtattccgctactttcagcgcaatgcgatagtcgaagtggatgtcagccaccagcggcacgttaacctgctgtttgatgagtttgaacgcttctgccgcgtccatcgtcggtacggatacacggacgatatcagcgccaacgcgttccagcgccttgatttgattgaccgttgcttcgacgtctgtcgtacgcgtattggtcatggactgtacggcgatgggagcaccatcgccaatcggcacattcccaacgtaaatacgtgtactttttctacgttgaattggagcctggttatgcatgaaaaatctcccgcgttacccgtctgttactgcgccggactttgttcggcattgagggtcagacgcgcaacctggttagttctgataaaacgactcagatcgacaggtttcccttgatactggatctgtactgcggctggcgcaccaattttcagtttgtacggtgcctggccggttaagttcaaattaccgtctttacgctgcataccgctaaacaattttttaccggtagcatcagtgacctccagccagcaatcggcagtaaagttcatcaccagcgcattcggatcagccaccggcgtggtcacgccagcctgatcggttggcaacggcgcagcaccatctggcgttgttgctgccgttggtgccggggtcgcggcggtatcaacatttgcctggctagggctaacaaccgcattctgttgcggatcaacagctggtgctggcgcagttacggcaggtgtttgcgtgttggttgcggtagtatccacagacgctggcggcgtggacgttgtagccgggtctgtagttgtgctcgtatttaatggaacactctgcccctgctcgctattactgctcagttccgcgctagattgatcggccatagtggtgatctcttcctgctgagctttgcggtcttgccaccaccaggcaccgctcaggccgataaccacaaacaacaccagccaagtgaaggtcatcagccagccgtcgcgttttttgcggcgtttaccgagggaaaaactctgcatcggcgcaacttttgcagcccgaagtggagcctgcttttccagccctggcagcagttcttcttctggaatatgtaccagacgcgcataagagcggatatatccgcgcaggaatgtactagcaagatcggcgggtgccttatcttcttcaatgtcgcgtaccgtggaaaccttcaggcaaagtcgctcggcaacggcctgctgactaagtcctagttgttcgcgagcattacgcaggcgagcgccggtagtaagtgcttcattttggtcgtgcgtggcttcagtattcattcgctgcaggtacgtttaaatgagaattgagatgccggtgaaccatcatgctcacccacaccgcgaaacatccgttaagttaaccgttatcatacagtataagaccgtctgtgtgctcgtgacaaagcccacattcactaaggctaacttactgttgcatcgttacatactgccttaaagtcagcaaaaacgcaccgttaatattgaccagacaattgcaacttaatacttcattcataaaacattacgccacggtacataaagtaaccgtggcgtaatggctatcagaccgctttaatgtcgatggcttcaccctgcatccgtttacgcagggtacgtttcgtacggtcgataacatcgcccgccaactgaccacaggcagcatcgatatcatcaccacgagttttacgcacaatagtggtgaaaccgtagctcatcagcactttactgaaacggtcgatacggctgttgctgctgcgtccatacggcgcacccgggaacgggttccacgggatcaggttgatcttacacggcgtatctttcagcagttccgccagttggtgcgcgtgttcagtgccgtcgttaacgtggtcaagcatcacgtattcaatagtgactcggccctgattggcgttggatttctccagataacggcgcaccgcagcaaggaacgtttcgatattgtactttttgttgatcggcacaatttcgtcacgaatttcgtcgttcggcgcgtgcagggaaattgccagtgcaacgtcgatcatatcgcccagtttatccagcgccggaactacaccggaagtggaaagcgtgacgcgacgtttagacaggccaaaaccgaaatcatcaagcatgatttccatcgccggaacgacgttgttcaggttgagcagcggctcgcccatgcccatcatcactacgttagtgatcggacgctgaccggtgacttttgctgcgccgacgattttcgccgcacgccacacctggccgataatttcgctcacccgcaggttgcggttaaagccctgctgggcggtggaacagaatttacactccagcgcacaccccacctggctagagacgcagagcgtggcacggtcgtcttccgggatatacaccgtttcgacgcgctgatcgccaacggcgatcgcccatttaatggtgccgtcagaactacgctgttcttcaaccacttccggtgcgcggatttccgccacctctttcagtttgccgcgcaacactttgttgatgtcggtcatctcatcaaagttgtcgcagcaatagtgatacatccacttcatcacctgatcggcgcggaagggtttttcacctaaatctttaaaaaactcccgcatctgctgacggttgagatccagcaggttgatttttccatctttcgtggtgacgttttcaggtgtgactaattgttcagacatatgctattccggcctcgttattacacgttatggcccctggagggttgaaaaaagaaacgccccggtgagcggctgctcgtccgggggcgctgcattgtacaaattctggcgcacggatgccacgtttgcacgcggcatttacgaaattattaacgggtgcgcgggcacacttcgccttcgccaaagaaataagcgatttcgcgagcggcagattcgacggaatcagaaccgtgggtaccgttttcggtcaggctgtcagcgtaatcagcgcgcagagtaccagccagtgcgtttgccggattggtcgcgcccagcagatcgcggtgacgctgaacggcgttttcaccttccagcacggaaaccacgatcgggccagaggtcatgaattcaaccagaccatcaaagaacggttttccatcgtgttcagcataaaagccacgtgcctgttcaacggtcaggtgcagcattttggtgccaacaattttgaaccctgcagcttcaaagcgcgcaaagatattaccaatgacgttttttgctaccgcgttcggtttgatgatggaaaaagtacgttcaatagccatttttacctctgtaaattgttctgttgttgtctgtaccagcgtacgagatggcgcggattataatgagcaacagggccgttgactattgatgaaggtaacatttttttaaaataaaatgagttttagcaacaatcagggacaaaacagattattgcatgacaaatttcactgtcgcgatttgccccacgtcatccatcaccagcaattgataatcacctttatccgtcaaatgcagggtcacgttgcgcccgcgttcagttaacggttcgccattcagaaaccaccagcgttcacctgcccctccactactttgcaacggcaaagtcgcttccgctgcgcccggtaaacgtttaataatcgcgccatcgcgaacgcctgtcagctgcagcgggagctgggcatcgtgaccgtatggcgggcaacttgtgctggccggtggtaagcgcacagcgcgacgttcacttgcgggcagccagggttccagcggtagcggccagacatttatcatttcttgtcgcgcttgcgggcaatcagcggcaacacgtttgccattttcatccagccagatggggaaacgaatgccattaatgccttcctgctccggcagtaatagagttggcggctgactcccgtccagcagccaggttgccaggcggcggcgacagttaccgtcaccttccggcaaagactgtccgcccggccagcagataacgccacgagtgacactgttcgggcgcgggtcttccggcagattcgcactgcggctcagtaagatattattgacctgattcaacaatggtacggcactggcaaagccaaactgaccaacaacgggcgtgccgtccggtctgccagtccagatcccaatgacatagcgagcgttaaccccaatcgcccaggcgtcacgatagccatagctggtgcccgttttccatgccagtggggcgacgcgcggcaaggcactatccggcaagggttgcgcttcatcagccataatccggcgaatgatccacgccgccccgctgctcattaaaggccgttcaagcagcggatcgtcaggctgtaagcgcaatttgcctgccttgccgtggcgagcaaacgcggtatacgctgccgccatatcttccagttttgcaccagcgccgccgagaatgagactaagattcggcgcagcaccgttgggcaaatataacggcaatccaacattgcgtaactttgccgcaaaccgtttcggtccataggcttccagcacctgcacagcaggtaagttcaggctgcgcaccagcgcctcgctcatgctgatcgggccatgaaaaccgctatcaaagttacctggtcgataatcaccggtgcgccgggggacgtcttgcagcagacttgccgggtggatcaagccttcatccagcgccagaccataaacaaacggtttgagcacacttcctgggcttcggatgctattgaccatatcaacatgaccaaagcgactatcatcgttgagatcaacgcttcccacccagccgcgaacacgcatatcggtatgatcaaccacgatcatcgccagactgctgcgcggtggcaaccgccctttccagttttgcgccagttcttccagacgtcgttgaagaccggcatccaacgtagtagtgattttgtcgcttttgcttttaccgagcatcatgcggctaaacagcggtgccagttgcggcatttgtcggggggccagccagatgggttcttccctactctcttttacctgctcacgggaccacacaccttgcacggccatccgttcgagcactttattacgcgcggcttcggcacgctccggccaacgatccgggcgaagacggctgggcgcttgcggcaaaaccgccagcattgccgcctcggaatagcttaaattcgcagggctttttccgagataagcccaacttgccgcaccgatcccctgcaacgtaccgccaaacggagcgcggttaagatacaaggtcagaatttcacgcttagacagatgccattccagttgcaacgcgcgccagagctggcgaattttgccgccaaatgttttggggtgaggatcaagcagacgagcaacctgcatagtgagcgtgctgccaccggaaataacccgtccgctagtgagatcttgccatgctgcgcgcgccacgctgaatggattcacccccggatgcttccagaaccagcgatcttcataattgatcagcgcttcaaggtaacgtggagaaacatcttcgattgttaccggataacgccagatgccgtcagcatcggcgaagcgccagagcggcgtaccatcctgcgccacgaccactcgtgcgggattgacttcatgcagcggtagaggccagagtttatctgctccccacgctgcaagaaaaaggagaaagggcgcggctgccaacgttatccagcagccgcgtttggttaacaagcgaggcatttacggtctgacaatcagcagatcttcagccgcgccggtcgcccgccattggggaacatacatactttccaccatcggttgcggtacctgatacgttcccggcgtcaccgcccgcgccagatacaccagcgttaccggttggtattcatcaacggcaaccgccgccacaaagcgatcgtcacggaactcaatgtgcttaatgctcgcctgctgcatctggttcagtaagttctgcacttcgccaccactttgctccaggctggcgctaccgttcgccagattctggttttccagttccagacccgcaggcagcagatccacgactaacgcatccggcacgctgttactggcttttacctgcaaccacaccagcaccagatcgccgctacgtaagctgtccaggcttttgctcttaccatcagtaccaagaatatgacgctcgatttgcagcacattgttcgccggtaaaggtgcggattgcggataaccgctggcatccatacgcaaccataacggctgatcgccactgttgctcacctgcaaggtgacaagttgatcgctattcagattgctgttttgcgctttctcgcctgtcagctgctcagcactgaaagaggtttgcgcctgccatttaccgggtaaatcctgaatcgtacgggcagccaggaacaacgcgttactttcctgcgtgcttagccagcgttcaccaaacgcctgctggctaagtgtgttcagcaaagtgtactgctcatcgggtagcagtttattttcttccagcaaggagagcattaacgcgttgtcgcgcagactactaccgtaatcacccagccatatccgctcatcactattacgcggcgttttcagcgccagcgcaatcgcttcttcaccacgcgtcgcatcacccatggttttcagcgcaacgccaagttgcagcagcggtaaaccagaagcggcatctgcacgatgctcccagatttcacgcagcgcacccagcggagccttttgctgacgggccaacaccagcgcagcgtaagactgtacggcgaatttactggctttgagattatccgcgtacgggatgctcatcatgcccggatcttgtaaatagcgcagcagacgctcattaccccggttaatggcgtctgtcggcacgctgtaaccctgttcgcctgcgcggaccaggaaatccatcacgtaagccgtcagccagtactcttcgtcaccgtttttatcccacagcgcaaagccgccgttatcacgttgcatttgcagcaaacgggaaatgccgatatcgacgcttgcacggcgtttctcatcactgtcgcctttgatgcccaacgcctgcagttgggctgcgttggtataaagactcggaaacaggccgctggcggtttgctcaagacagccgtacggatacgcttttaactctttgatataacgtgcgatgttcagcggtggtttgccgctcaacaacaattgcccttccagcgtaacagggctgaagttttgcaatccatccgccggaatcgcccatgtctcaccaggctgtaacgccgtaccgtaattaaccgtttgtgccgggaacgccggacggacgccgattttccactgcttatgctgatcggcaacggtttcacccggtaacgctaacccgctaatggtggcctgaatttctccatcgccataacccggcaatgctcgcaccgggataaacagcgtagtacgcacacctggcgctaattcaacggctgcgggactatcgctgaccagttcaagcaaaccactggcggtcagggcaacgttcagtttttgcggtttatcggtaagattagtgatatccagcgtcagacggctggtatcgccactcgccataaagcgcggcatgttcagttcagcaatcaccggtgcggcaactatcactttactttcgttgctaccgaagtcatctgccgtccaggcttgcgccatgacgcgcaattcaccgttaaaatcgccaatcggcagtgtaacgctgccttcgccctgttcgttgagcgttaccggcagcgcctgctgcacgacaatattgacgtgattgaccggcggtttaccaccacgtttcagctcatcaccatcgccaccgaaacgcagagctgccagacgcccctgaccttcaataacctgaccgtaaatatcgtaaatgtctgcgccatagcgtttctgaccaaagaacgcctgccacggatctggcgtgacgtagtcagtaatattcagcacaccactatcaacggcagacaccagcacattcacctgtttaggcttctcgccatttttagtgctggctttaattttcacggttaatggttgattgggacgcatttttgctggtgtttccagcgccagatcgaggcgacggttttcatcgccaagcggcagatgcaacacaccaaccgcgcgttttggcgtcgcggagcgagatttatcgccaggacgtaccaccagcgtacttaaatacagatcatgacgattccaggttttatcgaccggaatcgtcagatccagcccttgagcccgaacatcaatctcttgccaccacagcggcccttcactggactcgaccatcgcataacctttacccgccgttggcgcggcgatatgcaacttaatggtgtcgccagggcgataactggctttatccagtttcagcgtgacacggtcgggtcgcactgcgccgctaccgtcgctgttgtcctgccagctatagccagcccagaaacgaacactactgaccgcttcattcggcgctttgacttccagacgataagcgccccactctaccggaaaactgaccttgccggtttcgtccgctttcagatccagagtttgttcattttcgatcagatctttttgatcaaactgactctgccagccttcatcttcactccagttccagtagtaatcgcggcgttcgcgaatcaggcgcacctgcaagccgctcacggcttttttcacgccttgcgcatcgctataaacgatgtcaaaagcggcgttactgccttcatcaacaatgggctgtttcaccgtgctgtcagtacgataatcgtaaacgcttttgctggcgaactgcggacggatccccggcaatgcatcggcaggccagatagcctgctcagcgcggcgcgtcaccgggcgaccgccgctttccagcaaactaccctggaaaataacctgtaatggggaatgcgtttccttccactggctttctgtagaaacttcgccgcgccctttatcatccagcgtcaactgaacttcatccagcgtgcgggaaagattttcggcagctatatcgccgaattcaaaaccaggtaaggcactcacagcttcacgcagtgggcgcaggaaaagttgcccttgcaaagtattaccattagcaggtgcaccatacaggtagtaccccaccacggagaatttcacttcatctttcggcgttagcggggttttctcaccggtcagattcagcgccatgcgctctggcataaaatcttcgacgtggaaatcccacatccgatactgattatcgcccgtgttagcgcgaatatgccacataccggttgccgcattgctatcgagtggccaggtaaagtggtagaggccattctccggctgactaacgacgctcctgagtacctgcccatcgggtttaatcacgtctaacttgatgggttgattgggcaacgctttaccgtctgcatcacgcagcaaaccattgaggattaccgtttcacctgggcgataaagatcgcgtgggccaaacatgaaaaactgtttgctatagcctggcgcgccagcaatgttaaattctgctaagtccagcgccggaagttttaaatcgagtagcgttgtctgaccgtctttacgcgccaacagtaatgccgcgtttttatcattttccagctgcacatgcccctgagcgtcactggttgcctgagtcagagtctgccctttctcatttaataaagagacttcaattccttgctgggccgcgccgttttccagactttgggtaaagatatccagacgattgtgataacggtgagcactaacgccgatatcacttaacgtaaacagcgtcgcgggattactgtaatcgtaacgtccagcctgattcatcacagccagatacacgcccgcctgctgaagcggtttgatatcgcccagcggcagcaataatttttcacgggtgttacgcgcaggattgagatcaaaccgtccggtgtagaccagatccgccatctgcagcagtttgtcactctgccagttcgccaggctattgcggtattcccattggctaatgaatgctggcagagattctggcttaacgcggaagaagttaacatcgacattattaacgttgagcgccattaccggcagcccttcaacgactttgccaggcagcaggctaccacggctggcaaaaccgacgctgggttggatgtcgcgggtagttatagttttttcgtaatctttactgaaggttgcgttgttgagtgctttgacctccttgccaatagtaacgatcaaatcacgtttcggttcgaggtggcgtaaacgtaactctttaagattatcactcagctcccaggcaccatccactttgccgctttttttatcgacgacatgaataacgcgactgaaatcctgatccgggtcgagagggatggagaacgtcagcaccagcgtggctgcaccatcaagttggacttcagagagatccagcaatgtcagcaccttaccggcactctgttgggccagtttttgtctctccggcacggagagttttgcactactcgcgttttcactagaggccgctttagtaacttcagaaggcgcatcttttttcaccgctgttggcgcgttatcgttgttgtcgcaccctgccagcgccagcattagcatgcaggcggctacgcgtaactttttcatttttcatccctgccacaatggcccgttagcaacgtcgaataattattatgcgtgagaatttacgttatgtaattcagtatcacgcccatacaatccgaattttagtgagaattgtggctcagacagccaaatcagcctcttttgcttgtcgcttttcactaaacatccgacaatttagcctaaccccggcaaaaatggagatgcctatgtccacgacatggtttgtaggagccgactggctcgccgaacatattgatgacccggaaattcagattatcgatgcccgcatggcgagccctggacaggaggatcgtaacgttgctcaggagtatctgaatggacatattcccggcgcagtgttttttgatatcgaagcgctttctgatcacacttccccgcttccgcacatgctgccgcgcccggaaacgttcgccgtggcgatgcgtgaattaggcgttaaccaggataagcacctgattgtctatgacgaaggtaatcttttcagtgccccacgagcatggtggatgctgcgcacctttggtgtagagaaagtgagcattctggggggtggacttgcaggctggcagcgcgatgatctgctgttagaagaaggtgcagtagagctgccggaaggagagtttaacgccgcgtttaatcctgaagccgtggtgaaagtaaccgatgtattattggcaagccatgaaaatacggcgcaaattattgatgcccgcccggctgcacgttttaacgcagaagttgatgaacctcgcccaggtttacgtcgcggacatattcccggagcactgaatgttccgtggacggaactggtgcgcgaaggcgaactaaaaacgaccgatgaactggatgcgatattttttggtcgcggcgtcagctacgacaaaccaattatcgtcagctgcggctctggtgtaacggcagccgtggttttgttagcactcgcgacgctggatgtgccaaacgtgaaactgtacgacggcgcatggagtgaatggggcgcgcgggcagatttaccggttgagccagtgaaataagtattttacaggcaataaaaaaccgccgaatttggcggttttttattgctagtctggttcgcggcctttccagcaggttgacttgtgttacatgagcaacgcaggtgcttcacagcaaaacaatactcaccagtaactctctttttgtcaagcaaaagagagtaattattgtttatttagcgtattatcgacaccggccctttccgccgtgttcggtaataaaataacctggcttattagtccgaattcagacaaatataaataaatcctgctcaaaattaaaaattctaaccggtaaaagatattacttaaacatgtaaattcactttcctttaaaaaacaaaaaaccgccaaaatcaggcggttttttgttgctggtccggttcgcggcctttccagcaggttgtattaccgtagtaatgcaagcgcgtctcagcggagacaatactcgccagtaactctctttttgtcaagcaaaagagagttattattgttctgttagtgtattatccactgcggccctttccgccgtctcgcaaacgggcgctggctttaggaaaggatgttccgtggccgtaaatgcaggtgtttcacagcgcttgctatcgcggcaatatcgccagtggtgctgtcgtgatgcggtcttcgcatggaccgcacaatgaagatacggtgcttttgtatcgtacttattgtttctggtgcgctgttaaccgaggtaaataataaccggagtctctccggcgacaatttactggtggttaacaaccttcagagcagcaagtaagcccgaatgccgccctttgggcggcatattttagattatccgattctgtttaaagtcacgcaaaaaaccaccccagcgacgttcatagaatggcgcaatatgttcggtaataaagtggctaattcctttttccccttttttcacctgacaaatatcgattggttcatcgccaggtaatgtatcggtcgctacacttcccgtcgcctgaataatttcttcgatatcaccatcggcttcaatgccaataagtaaattaggctgtgcctcttcgttctctttaatactacaaataaaagcacgcttcaccggcttaatggttttaaataaggtggtgagactatcaatcatttgtgctggcggctctgcgacttcgcttaatatcaggctttcaccgccttccaggatttcctggctgctcagcggatttccctcttcaccaatcaacaaactgatttcacgcggcataaattctttaccggttggcagtttggcattaaggaagagcgtttcgccaagtgtcatctcaaacagcgtgcgaacgggcattacgacaaatgcctgttcgtcttcaaccgcctgttgaagtgcttctaagctggtgaaaaaaggaatgacgctggtgccgtcttctttttcccagtgctgtaaatcaagcgcgctatcttcaaccacagcctcgccctgcgccgccgtaccaggcacccagacggtggattccagtagagtacggaaaaaggccgggcggtgcgccggttcagttgctgctttttccagcaggtcttcaagttcgttttttgtttcggacataagaaccacaattcattcaacgttcggggcgcaaatgcctgatgcgctacgcttatcaggcctacaagggattcgcaatttgttgaatttgcagaatttgtaggccggataaggcgtttacgccgcatccggcatattagtttacgccgttaacagattagctatcgtgcgcacaccaagtcccgtagcgcccgcagaccactgttcaaccggcgctttacggtaagtcgcgctgcagtcgatatgcagccagccttgctgatagttctcaacaaagtggctcaggaagcccgccgccgtgctcgcgcctgccggatacgccgcgcttccggtattgttcagttcggcaaagttagacggcagctggctgcggtggaactccgccagcggcagacgccagaacggttcgttctcctgcgcggcactcgccagcaagcgaccggccagcgcatcgtcaaaactgaacagcgcgtgataatcattacccagcgcagttttcgccgccccggtgagggtcgccgcatcaatgatcatttccggtttctgcgcactggcatcaatcagaccatcggcaagcaccagacgcccttcggcatcagtgttcatcacttcaacttttttaccgttgcgataggtgatgatatcgcccagcttgaacgcattgccgctaatcaggttatccgcacagcagaggaacagcttcacgcgcttgttcagtccgcgcgtaatggcaaatgccagcgccccggtaaccgttgccgcgccgcccatgtcgctcttcatgctgtccataaacgcagtctgtttgatgctgtagccgccggagtcaaaagtgatacctttacctaccaggcacgcgtacactggcgcttctttatcgccagttgggttgtaatccagcgccagcaataccggagaacgttcactaccgcgtccgactgtgtgcagccccatataaccttgctcacgcagatcttcgcctttggtgatccgataagtcacacgatcgcccgcgacgttgctgatcagatcaacagcacgctgtgccagttggcttggtcccaattcttctgccggtgcgttgatggtgtcacgcacccagtcgatgatcatcaggcggttatccagttcctggcgctgggcatcgtccagatccggccacaccactttacgcgtgcctttcggggctttgtaaccttgccagaatgcccagcagcgatccgcatcccagccttcaccgcttaactgaacatgcttgatgcccagaccgtcaatcttgcgcgccgcacgctggatcagccccagatcgtctgccccgttcaaatgcagggtaatgccgtcattattaatgctgtaagttgctttttctccccagcgcgcgtcggcaggttgggtagagagggtaatcttcatcgcttctgtcattttagttatccttctttgtaaaagggccgccagttggcagccccaggatttttccgctaaatgattcgcgttgcaggaaggcggcaagtgagtgaagccccaggagcatagataactatgtgactggggtgaacgagcgcagccaacgcatctgcggcgtgaagcatgacgcggaaattattcggcctcgtccagccagactaacaaaatcgcttcgaggattttctcgttggatgcctgcgggtcgtcgtcgaaatcttccagatcgcaaatccactgatgcatatcggtgaatcgaaccgttttcggatcaagatcgggatacgcatcgtacagtgcttcgccaatttcgcggctatcggtccacttaagtcccatactaacctctgttaatgctcacgcgcatggttgatagtgtaacgcgggatttcgactactaaatcttcgtcggtaacgcgcgcctggcagcttaaacggctttccggctccagtccccaggctttgtccagcatgtcgtcttcctgctcactgctttccggcagactgtcaaaaccttcacgaacgatgcagtggcaggtggtgcaagcacaggatttttcacaggcgtgttcaatctcgataccgttacgcagagctgcgtcgagaatggtttcaccgctattagcttccagaacagcgccatcagggcagagatcctgatgaggcaaaataacaatctttggcatattaaacctcgtccacggaatggcctttcagcgcacgacgaacgctctggtccatgcggcgagcggcgaaatcctgggtttgtttgtctacgtttttaatcgcttgttcgatggcgtcaacatcatcgccctgcgccacttcactcaggtgagcggcagcatcgtcaatgacctgacgttctgcggcgcttaacagcgcggcatcagcagccagcgcgccgtgcagactttccagcacacgcgccgcttctactttttgttctgccagcattcgggcttttacgtcctgctcggcatagctcatactgtctttgatcatgctagcgatttcgctatcggtcagaccgtaagacggtttgacctgaatagacgcctcaacgccggtggatttctccatcgccgtcacgctcaaaagaccgtcggcatcgacctggaacgtcacgcgaatatgcgcaccgccagccggtagcgccggaataccacgcagcgcaaaacgcgccagactgcggcagtcctgcaccagttcgcgctcaccctgcattacatggatagacatcgccgtctgaccatctttaaaggtggtgaaatcctgagcgcgggccaccggaatagtggtattacgcggaatcactttctccaccaggccgcccatcgtttcgaggcccaggctcagtgggatcacatcaagcaacagcatttcgctgtctggcttgttacccaccagaatatccgcctgaatcgccgcgccaatagcgacgactttatccgggtcgatggaagtcagcggtggacgaccgaaaaattcgcctacccgttcacgcaccagcggcacgcgagtagaaccgcccaccatcaccacttccagcacttcatcagcttctacacccgcgtctttcagcgcgcgacgacaagccagtaaggttcgttttaccagtggcgcgatcagttcattgaattgttcacggctgatttcgccctgccagcccgcaacgttaacggtcacggagtccgcatcgctcagcgcgattttggctgcaatggcggcatccagcagttcacgctgaacgcggttatcgctacgatcaggaatgcccgcctgctcgcgaatgtaatccgccagcagatggtcgaaatcatcgccgccgagcgcggaatcaccgccggttgccagcacttcaaacacgccgcgacttaagcgcagaatggaaatatcaaacgtcccgccaccgaggtcataaacggcgatcacgccttcctgaccggaatccagcccgtaggcgatagccgcagcggtcggttcgttaagtaagcgcaggacgtgaaggcccgccagacgcgccgcgtctttggtgccctgacgctgggcatcgtcaaagtacgccggaacggtgataactacaccatccagctcgcctgccagggcttcagttgcccgcgccgccagtgctttgaggatgtccgcagaaacgcgcaccgggttcagcagccccgccgccgtttcaatcatcggcaggccgttttcgctggcctggaattgataaggcagatgcggatagcgttgctggatatcagccaggctgcgtcccatcaggcgtttaacagaactaattgtgttggcggtatcgagcgctgcattagtacgcgcgtcataacccacgctatgcccttgctgttgatagtgaacaacagatggcagcaggtgacggccttcatgatcggctaacgtttcggcctgaccgctgcgcactgtcgccaccaggctgttggttgtgcccaggtcaataccggccgccagacgacgctgatgcggcgcagcactcaaaccaggttcactaatttgtaataaggccatgtttagcttccagaaattaaaaatcgagcagtttttcttcgagttgttcggcactgcttcgcagtttatcgagaaaacgcagcttacgcacggtatccgccgccgcgtcccacgtctcgttgtctaactgttcaaccatcaactgatggcgggtatcaaacatctttttcacacgtttgataaagctttccagccgcgcttcatctttcgcctgttcgatctcgtccagctcttcgcgcagctccaactgttccatcaggaacgcggtgtcgcgcacagtatgctgctcgctggcgagatcaaagccgtgcaaagaaagcaaatattccgcgcgcattaacggatgacgcagcgtttgccaggcctggttaatggttgcagattgctgtacggcggcgagttgttccgcctggcttccgctggcgaatttatcaggatgatactgacgttgtagatcctgaaaacgcaggctcagcgcctgggtatcgagttgatagcgggcaggcaagccaaagagggtgaagtaatccataacattctcagggctgcgatccgccgcgataacggcgaatcaggtaaaacaaaccccacgcgcaggcgaccacggtggggttatcggtatgcgcatcaaacgtggaagctttcgccgcaaccacactcatctttgacgttcgggttggtgaatttaaacccttcgttcaggccttcttttacgaagtccagctgcgtaccgtccagaaattgcaggctcttgccatcgaccacgactttcacgcctttgtcttcaaacacgatgtcttccggcgtcggttcgtcaacaaattccagtacataagccataccactacacccggaggttctcacgcccagacgcaggccaaaccctttaccgcggttagccagaaaggtatttactcgcgctgctgcactgtcgctcagtgtaatgctcataaccaaacctcaactcttattttgcttcacgtttgcttttatagtccgcaatggcggctttgatcgcgtcttctgccagaatagaacagtgaattttcaccggcggcagttcaagttcttcagcaatatcggtgtttttgatcgcctgcgcttcgtcgagagacttccctttcacccattcggtgaccagggagctggaagcgatagcggaaccgcagccgtaagttttaaaacgcgcgtcttcaatgataccttcatcgttgactttaatctgcaacttcatcacgtcgccacaggccggtgcccccaccatgccgctgccgacgttctcgtcgttgttgtcaaaggaacccacgttacgcggattctcgtaatggtcgataactttttcgctgtaagccattataaattctcctgattccgataccgattaatgatgagcccattcgatgctgttcagatccacgccctgcttgtacatttcccacagcggagaaaggtcacgcagacgaccgatggatttacgaactaactcgatggtgtagtcgatctcttcttcagtagtaaaacgacctaaagagaaacggatagagctatgtgccagctcgtcgttcagccccagcgcgcgcagcacgtaggacggttcgaggcttgcactcgtacaggcggaaccactagaaactgcgaggtctttcagcgccataatcaggctctcaccttcaacgtagttgaagctgacgttgagaatgttcggcgcaccgtgttccaggtcaccgttcaggtaaacttcttcgatatctttgatgccgttccacagacggttacgcaggccgcgcagacgttccatctcggtcgccatctcttcttttgcgatgcgataggcctcgcccattccgacgatctggtgaacaggcagagtgccggaacgcataccgcgctcgtgaccgccgccgtgcatttgcgcttcgatgcgtacgcgcggtttacgacgtacatacagcgcaccgatacctttcgggccatagattttgtgaccggagaaagacatcaggtcaactttcaactggctcaggtcgataggcagtttacccacgctctgggttgcatcaacgtgatagataatgccacgagcacggcacatttcgccgatagccgcgatatcctgcaccacgccgatttcgttatttacgtgcatgatggacacgaggatggtgtcgtcacgcatcgctgcttcaagttctttcaggtcgataatgccgttacgctgcggtgccaggtaggtgacttcaaaaccttcgcgctccagctgacggcaggtatccagtaccgctttgtgttcggttttgctggtgatgatgtgcttgccttttttctgataaaagttggctgcacctttgatcgccaggttgtcagattcggttgcaccagaggtaaagacgatttcacgcggatcagcgccgaccagatcggcaatctgattacgggcgatatctaccgcttcttcagcctgccagccgaaacggtgagaacgggaggccgggttaccaaaggttccgtccatcgtcataaactgcatcattttctcggcaacacgcgggtccaccggcgtggttgcggagtagtcgagataaatcggtaatttcattgctctataaactccgtacatcactcaatgcaaggaatcaggctaccggctggatgtacgaccgtgtttacggagtatttagcactccggcctgattctgaattctttttattaagcgcgtaacttaacgtcgatcgcgtcttgtgtgcgggtgcgtggcgcgtcgtgagtatgctgacgaccagacacatccagcacttcctggttattaaccagttcgcctaaagtaatgttgttgagaaaaccggtgagacggtcgctcaaatcacgccacagcgcgtgggtcaggcatttatcgccgccctggcagccgcctttaccctgacaacgggtggcatctacagattcgtcaacggcgctaattacttcgccaacggcgatgctgctggcatctttgcctaacagataaccaccgcctggtccacgtacgctggaaaccagaccatttttacgcagacgggaaaacagttgttccagataagaaagggaaattccctgacgttcggaaatatcagccaacggtaccgggcccgcttcagagttgagcgcaacgtcaagcattgcggtcacggcatagcgccctttagatgtcagtctcatgtcttacttcacctcaaactcgcccctgcccggggttttttattgtaaaagtgggggtattgcatagcagggtcaagtctgacattcccgagtaaattggtcaactatttacttgactgatttagtcgggtatttaaccttcagtgccatttttttatcgtggcgtttgtacctgttgtcggatgcggcgtgaacgccatatccgccctggggttctgtacactgtaggcctgataagacgcattacgcgtcgcatcaggcaacggctgtcggatgcggcgtgaacgccttatccgacctacggttctgttcactgtaggcctgataagacgcattacgcgtcgcatcaggcaacggctgtcggatgcggcgtgaacgccttatccgacctacggttctgttcactgtaggcctgataagacgcattacgcgtcgcatcaggcaacggctgttattcggccttgttacctttattctgctgctcaatagaagccagaatcccgcgcaggatattcaactcctggctttccgggcgcgcacgggtaaacagacggcgcaatttattcatcacctgccccggatggttttcacggataaaaccggttgccagcagcgtttgttccagatgaccataaaaacgctccagatcatcgaccagcggatacggcgtctcttcatgctcgacctgctcgccgttttcctgagttgccagccaggccatgcgcacttcataggcaataacctgaaccgccatcgccaggttcaggctgctgtattccgggttagccgcaatcgcgacatgataatggcatttctgcaactcttcattggtcaagccgacgcgctcgcgaccaaacaccagcgccaccggggtatttgccgcttcagcgacgcttttcaggccgcattcgcgcgggtcgagcatcggccatggcagcgtgcgggaacgtgcgctggtgcccaccaccaggctacaaccggctaacgcttcgtcgagcgtatcgacgatgtgagcattaccaatcacatcgctggcccctgctgccagggcaatcgcctgggagtcgggtttcaccagtggattaaccagccacagattggttaatcccattgttttcatggcacgggcaacagaacccatattgccggtgtgactcgtctccaccagcacaattcgaatattttgcagcattgtctttcttcatctaaagattattcacgcatcttatcataaaacgaagacagatgccgatctcgctgctatactctgcgccgttttcccgttctttaacatccagtgagagagaccgatgcatccgatgctgaacatcgccgtgcgcgcagcgcgcaaggcgggtaatttaattgccaaaaactatgaaaccccggacgctgtagaagcgagccagaaaggcagtaacgatttcgtgaccaacgtagataaagctgccgaagcggtgattatcgacacgattcgtaaatcttacccacagcacaccatcatcaccgaagaaagcggtgaacttgaaggtactgatcaggatgttcaatgggttatcgatccactggatggcactaccaactttatcaaacgtctgccgcacttcgcggtatctatcgctgttcgtatcaaaggccgcaccgaagttgctgtggtatacgatcctatgcgtaacgaactgttcaccgccactcgcggtcagggcgcacagctgaacggctaccgactgcgcggcagcaccgctcgcgatctcgacggtactattctggcgaccggcttcccgttcaaagcaaaacagtacgccactacctacatcaacatcgtcggcaaactgttcaacgaatgtgcagacttccgtcgtaccggttctgcggcgctggatctggcttacgtcgctgcgggtcgtgttgacggtttctttgaaatcggtctgcgcccgtgggacttcgccgcaggcgagctgctggttcgtgaagcgggcggcatcgtcagcgacttcaccggtggtcataactacatgctgaccggtaacatcgttgctggtaacccgcgcgttgttaaagccatgctggcgaacatgcgtgacgagttaagcgacgctctgaagcgttaatgactcaggcgggtgatatcactcacccgccctcgcctttcaggcgctattccgaaatacttcctcactgctttactttctttcgtcactctcccaccatctttccccgattaatggatgataaagaagagccaaggaaaggttatggcactgccagtgaacaaacgcgttcccaaaattctgtttattctctttgttgttgccttctgcgtttatttagtgccgcgcgttgccatcaacttcttctattatcccgacgataaaatttacggtcccgatccctggagcgcggaatccgtcgaatttacggctaaggacggtactcgtctgcaaggctggtttatcccttctagcacgggccctgctgacaacgccatcgcaaccatcattcatgctcacggcaatgccggaaatatgtccgcccactggccgctggtcagttggttacccgagcgtaatttcaacgtttttatgtttgattatcgcgggtttggtaaaagtaaaggcacgccgtcccaggccggattgctggacgatacgcaaagtgccatcaatgtggtgcgccatcgcagtgatgtaaacccacaacgtctggtgctgttcgggcagagtattggcggggcgaatattctggatgttattggtcggggtgatcgtgaaggcatacgtgcggtgatcctcgactccacatttgcctcttatgcaaccatcgccaaccaaatgatccccggcagtggctacttacttgatgagagttacagcggcgaaaattatatcgccagcgtcagcccgatcccgcttttactcattcacggtaaagctgatcacgttatcccatggcagcacagcgaaaagttgtatagcctggcaaaagagccaaaacggttgatcctaatcccggatggcgaacacattgatgctttttccgatcgtcacggcgatgtttatcgcgaacagatggtggactttatccttagcgcgttgaatccgcagaactaacccatgatcgctagcacgataatcattcacaaaaccaccttaagacatgctaatccactggtcagaacagtttaagatgagaaaaattctgtgacgcttgccaacatttctgatgattagcattcccttcgccatttccttgagcaaactttagctattcttatcaattatgcttatgggagatctacagatgatgcctacgcttgctccaccatctgtccttagcgctccccagcgccgctgccagatcttgctgacgctctttcagccggggttgaccgccaccatggcaaccttcagcgagcttaatggtgtggatgatgatattgccagtcttgatatcagcgaaacaggacgggagatcctgcgctatcatcaactcacactgacgactggttatgacggtagctaccgggttgaaggtacagtgcttaaccaacgtttgtgtttatttcactggctacgacgtggtttccgtctgtgtccgagttttattaccagccaattcacccccgccctgaagagtgaactgaagcggcgcggaattgcgcgtaacttttacgacgataccaatctacaagcgttagtgaatctctgctcccgacggctgcaaaaacgctttgaaagccgcgatattcatttcctgtgtctgtatctgcaatattgtttgctgcagcaccacgctggaattacgcctcagtttaatccgctccaacgtcgctgggcggaatcctgccttgaatttcaggtagcgcaggaaattggacgccactggcagcgtcgggcgctccagcctgtaccacctgatgagccactgtttatggcactacttttttccatgttgcgggttcccgatccattgcgggatgcgcatcagcgggacagacaattgcgtcagtctatcaaacgtctggtaaaccattttcgtgagctgggaaatgttcgtttttatgatgaacaggggttatgtgatcagctttatacccacctcgcccaggcgttaaatcgcagtttgtttgccatcggtattgataataccctgccggaagagttcgccagactgtacccacgcctggtgcgcaccacccgcgcggcgctggccggatttgaaagtgaatacggcgtccatctttctgatgaggaaagtggtctggtcgcggtgattttcggtgcctggctaatgcaggaaaacgatctgcatgaaaaacagattattcttcttaccgggaatgatagcgagcgagaagcgcagattgagcagcagttacgcgaactaacgttactgccgctcaacattaagcatatgagcgtaaaggcatttttgcagacaggcgctccgcgtggcgcggcactgattattgcgccttataccatgccattaccgctctttagtccaccgctgatctatacggacctgacgctgacaacacatcaacaggagcagatccgcaaaatgctcgaaagtgcatgatcagcaactgggaacaactttcgggcgcaaaaacattgccggaagcgccaccagcgccattacccagaacacgccgtggcccagatattgatacaggaaaccggcgaaaacggtcatgatagcgatactgccgcccatcgcgacggcagagtaaaccgcctgtaaacggatgacttcgctaccctggcgagcagcaatataacgcatggcggccaggtggcagaccgtgaaggtgccgcaatgcagaatttgcaccactatcaaccacggcaacgccgtagttgctcccataatgccccagcgcactacgccgcaaatcgcgctgatcaacagcatatcgcgtgcactacaacggcggaaaagtttattactcagcgcaaagataatgacttccgccaccacgcccaggctccacaaataccccaccgcgctggcgctgtagccagctgcctgccagtaaatggcgctaaaaccgtaataggccgcatgtgccccctgcaataaacaaacgcaggccagaaagcgccagttctggcgaaccagcgccaaccacgcagaccaaccggtgctctcctgctggcgacttgccccttgtggctgaatcgtcggacggatgagaaagccgagcagcatggatgccacgcccaacgtcaacagcgcgaggatcacccgataatcaaacatagtgaccagtttgcccgtcagcgcgctgccaatgacaaacgccacgctgccccacagtcgcactttgccgtaatcaagcgggaactgcttttgccacgtattcgccagtgcatcggtcaacggtaccagtggactgaaaaagaggttaaagccaatcatcaccagcatcagccacgctacgtgcgcccccgcccagaaggcgacagcaaagagaagtgtcagcagtgccagcacgcgcaaggcggaaatcaggcgggaaggatcgctgacgcggggcgcgatgagcaaactcccgaggaaacgggcaaccagacctgcccccaataacaggccgatggtttctggcgttaaaccaatccctttaagccagacgctccagaaaggtagaaaaatgccgtaactaaaaaagtatgtgaaatagccgagcgccaaccagcgcgtggattgcaaaaccatgagtccctcccgtcaggaggcgttagtctggggttaatcgaatgttggtgcaagttgaaaaataagaatattcgagcctgcttcccgatgtctgtaacgccagttcacaagcactaaaaaactgagatccgcgacgcatgttgcaaaaataatgcgtaattatgccgttacgcttgccaaacgttcctgcacaatggcgatgaaatcgcgtaatgccggcttcatctcccctttcttccacgccatcagtaaagcaatggaaggcacatttccggcaatgggacgaaaaacaacctgtccggtattaaaattattcatataaccgggtatcaaagtgacgcccagccccatgcccaccagattcatggtcaccagaatattcgttgccacctggacgatatttggctggctgttttcttgcgcaaaccacgctttaacgatcggcgcaaggctaccggaatacaccggatcggtactgacgaaattcacgccatccagttgcgcggcggtgatctctttttcatgtgctaaagggtgatcaaccggtaacacaaccactaatggttcgtcaaaaagctccagataatcaatctccgggctataaacaggatggcgcattaagccgacgtcgagttcaccacggcgaattttttcctcctgttgcgtggtgattaaactcaccagctcaatcaaggtgtctggctgtctgagacgaaacatcggtaatacttttggcagtaaattcacttccgcgcttggcacaaagccaatggttaattgtctgtcttcctgaacaattttccgcgcccgtaatttggcattttccgcttgttcgaggattgccagcgcgtcctggagaaaacattctcccgccgccgtcaacgcgactttgcgcttatccctcaccagtaacggaacaccgacacagttttcaagatcgcggatctggctgcttaagctaggctgactggtatgcagtttttccgccgcacgggtaaagttcagtgcctgcgccactgcgacgaaatagcgtaaatgccgtagttccatcaccttccccttgttatcgaaaaaacgtctcagctggtagaaattaactatttcacatattagcaaccaaccagcaacatccttatggcacaaaaatagaaggtcaatacatcttatctttcaggattaaaaaatatgaccacacccagtgatttgaacatttaccaactgattgacacccaaaatggtcgggtcactccgcgtatttataccgacccggatatttaccaactggagcttgagcgtattttcggtcgttgctggctatttctcgcccacgaaagccagatcccaaaacccggtgatttctttaacacctacatgggagaagatgcggttgtcgtagtgcgtcagaaagacggcagcatcaaggcgtttctcaaccaatgccgccaccgggccatgcgtgtgagttatgcagattgcggcaacactcgcgcctttacctgcccgtatcacggctggtcttatggcattaacggcgagttgatcgatgtaccgctggaacctcgcgcctacccacaagggttgtgtaaatcccactggggactaaacgaagttccttgtgtggagagttataaagggctaatttttggcaactgggataccagcgcaccgggcctgcgtgattacctgggtgacattgcctggtatctggatggcatgctggatcgtcgcgaaggcggcaccgaaattgtcggcggcgtacaaaagtgggtgatcaactgtaactggaaattcccggcagagcagttcgccagtgaccagtatcatgctctgttcagccatgcttctgccgttcaggtattaggggcgaaagatgatggcagcgataagcgcctcggtgatggacaaaccgcccgcccggtgtgggaaaccgccaaagatgcgctgcaatttggtcaggacggtcacggtagcggtttcttctttactgaaaaaccggatgctaatgtctgggtcgatggcgcagttagtagctattaccgcgaaacctatgccgaagcagaacaacgtttaggtgaagttcgcgccctgcgcctggcgggtcataacaatattttccccacgcttagttggctaaacggcactgccacactccgcgtctggcatccgcgcggccctgatcaagttgaagtgtgggcgttctgtattactgacaaagccgcctccgatgaagttaaagccgcttttgaaaacagcgccactcgtgcttttggtcctgctggttttctcgagcaggatgacagcgagaactggtgtgaaatccagaaattgcttaaaggccaccgcgcccgcaacagcaaactgtgtctggaaatggggcttggtcaggaaaagcgccgcgacgacggcattcctggcattactaactatatctttagtgaaactgccgctcgtggaatgtaccaacgctgggccgatcttctgagtagcgaaagctggcaggaagtgctcgataaaaccgccgcttaccagcaggaggtgatgaaatgagtgcgcaagttagtctagagttacatcaccgcattagccagtttctctttcacgaagccagcttactggacgactggaaatttcgtgactggctggcgcagctcgacgaagagattcgttacaccatgcgcaccacagttaacgcgcaaacacgcgaccgccgcaaaggcgtccagccaccgacaacctggatttttaatgacaccaaagaccagctggagcggcgaatcgcccgtctggaaacgggcatggcctgggcagaagagccgccgagtcgcacccgtcacttaatcagcaactgccagataagcgaaaccgacatcccaaacgtatttgctgtgcgggtaaattatctgctttatcgggcacaaaaagagcgcgatgaaacattctatgttggaacgcgtttcgacaaagttcgccgtctggaagatgacaactggcgcttgctggaacgggatatcgtcctggatcaagcggtaatcacttcccataacctgagtgtactgttctgatgaatcgaatttatgcgtgtcccgttgcggatgtgccggagggtgaggctctccggatcgataccagccccgtcatcgccctgttcaacgttggcggcgagttttatgccattaacgatcgttgcagccatggtaatgcgagtatgagtgaagggtatctggaagatgacgccacggtggagtgcccgctacacgccgccagtttttgcctgaaaacggggaaagcgttatgcctgcccgccaccgatccgctcaccacttatccagtacacgttgaaggtggtgacattttcatcgacttaccggaggcgcagccatgagcgatctgcataacgagtccatttttattaccggcggcggaagcggattagggctggcgctggtcgagcgatttatcgaagaaggcgcgcaggttgccacgctggaactgagcgcggcaaaagtcgccagtctgcgtcagcgatttggcgaacatattctggcggtggaaggtaacgtgacctgttatgccgattatcaacgcgcggtcgatcagatcctgactcgttccggcaagctggattgttttatcggcaatgcaggcatctgggatcacaatgccagtctggttaatactcccgcagagacgctcgaaaccggcttccacgagctgtttaacgtcaatgttctcggttacctgctgggcgcaaaagcctgcgctccggcgttaatcgccagtgaaggcagcatgattttcacactgagtaatgccgcctggtatcctggcggcggtggcccgctgtacaccgccagtaaacatgccgcaaccggacttattcgccaactggcttatgaactggcaccgaaagtgcgggtgaatggcgtcggcccgtgtggtatggccagcgacctgcgcggcccacaggcgctcgggcaaagtgaaaccagcataatgcagtctctgacgccggagaaaattgccgccattttaccgctgcaatttttcccgcaaccggcggattttacggggccgtatgtgatgttgacaagccggcgcaataatcgcgcattaagcggtgtgatgatcaacgctgatgcgggtttagcgattcgcggcattcgccacgtagcggctgggctggatctttaaggaagcacgatgaaagaaaaaacgatcattattgtcggtggcgggcaagcggcggcaatggctgcggccagcctacgccagcaagggttcaccggtgagctgcatctgttttccgatgagcgacatcttccttatgaacgacctccactcagcaaatccatgttgctggaagattccccgcagttacagcaggtgttacccgctaactggtggcaggaaaacaatgttcatctgcattccggtgtaaccatcaaaacgctgggtcgcgacacacgagagttagtgttaaccaacggcgaaagctggcactgggatcagctttttatagcaaccggcgcggcagctcgaccgctgccgttgcttgatgcactgggagaacgctgctttaccctacgccatgccggtgatgccgccagactgcgagaagttctgcagcccgaacggagtgtcgtgattatcggtgccggaactattggtctggaactggctgccagcgccacgcagcgcagatgtaaggtgacagtgattgaactggcggcaaccgtcatgggccgtaatgcaccaccgcccgtgcaacgctatcttttacagcgccaccagcaggctggtgtgcgcattctgctcaataatgccattgaacatgtggtcgatggtgaaaaagtagaactgacgctgcaaagtggggaaacgcttcaggctgatgtggtgatttacggtattggtatcagcgccaacgagcaactggctcgcgaggccaaccttgatactgccaatggcattgtcattgatgaggcttgccgcacctgcgatcccgcgatctttgccggtggcgatgtggcaatcactcgtcttgataatggtgcactacaccgctgcgaaagctgggaaaacgccaataaccaggcgcaaattgccgctgccgcaatgttagggctaccgctaccgctactgccgccgccgtggttctggagcgatcagtacagtgataacttacagtttattggcgatatgcgtggcgatgactggctttgtcgtggcaacccggaaactcagaaggcgatttggtttaatctgcaaaacggcgtgcttatcggtgcggtcacgctgaatcaggggcgtgagattcgcccaattcgcaaatggatccagagcggcaaaacgtttgatgcgaaactgctgatagatgagaacatcgcgcttaaaagtctgtaaccaggataattagcgaatatctcaatgcctggggcgtggcgaggtgcaagagtgtgtattacgtttaaaagtcattatcttgcaaagggattggttatgaacacactacgttattttgattttggagctgcccgccccgttttgttattaattgcccgtatcgccgtggtcttaattttcattatttttggttttcccaaaatgatgggctttgacggtacggtccaatatatggccagcttgggcgcgccaatgccgatgctggcagcgattattgcggtagttatggaagtgcccgccgcgatattaatcgtgcttggctttttcacccgtccgctggcggtgctgtttattttctacacgctgggtacggcggtgattggtcaccattactgggatatgaccggcgatgcggttgggccaaatatgattaatttctggaagaatgtcagtatcgctggcgcgttcttgctattggcaattaccgggccgggggcaatttctctcgatcggcgttaagaaagatgccggatgcggcgtgaacgccttatccggcatttaataaattacagccactctacccgcaagctcatctcactagttgtactttcccctggtgctagcgcaatgagatcacccccttccgggcgatgatgatcatccggcgcatggctcatcggttccagacagaagaaatcaaacgcatatcctttatcaaacgcagggtcggaaacaaagatgaaataacacggtgcaggtggcgtcgtttccatgatgatggcataaccttcctgcggctgctcgatgcgggcctgaccattccatccggcaaaaccattgttcacccactggcgcggcaacggcgcgggctggttaaaatccagttcctgcggtagctgctcgcaaaactcacccgccagccactgctcccgctccagccagtaaccgctcgcctgtgcctgaatccgcgtttgcgggctcaacggaaaataaggatgccagccggtaccaaatggcagcgtctctgccccttgattggtgacagagagcgtcaccgtcagcgtatccgccgttaaatgaaacgcctgacttacccgatagtgatagacaccgctgcgatgttcatacaccagacacaaactatcatcgctgtggctgacacattgccactcgcccagccagccatcgccgtgtagatagtgcgcatcccactcaacattcggttgcagttgatactcacgcccctgccagacaaaacgattgccgctcacccggtttgcaaatggcaccagcggaaaacaactggcatcggttgccacaccgctttttttaccaggacgtaagagcggcgtcgtatcgcgccagaagccttcgattacgccgccctggtcagaaacgtccagctttaggctcccgtgggataaggtatagatggtcatccgctaactccttaatccgggaagttaatcacaactttcccgcatttgccgctcgccatcagcgcataggcatcacctgcctgttccaggctgaagcgatgggtaatggcgttacgcggccacagcttccagtccgtcagatcatgggcgcatttttccatatggaacagactggtcacccaggagccgataatccgccgttgatggtgcatcagatcggcgctgacctcgaattccacttttccggtttcaccaatgtaaaccacccgtccccagtcagcggtggattgcagtgccagcaagcgacctgcggcattaccggaacaatcgagcgcaacatccgcgccaccgtgggtgagttcggcgataatctgcggcagaccttcggtggttgctaaatagccgtgatccatcacccctaactgttttgccatcgccagacgttccggcagcatatcaacgccgatgatccgttttgcaccgcgacctttcgccagcatcatcgccatcatgccgactggccccagaccgaccaccagcacgttatcactgccggaaacttcgccgcgcaaaattccttcatacgctgtaccaacgccgcaactgataaacgcaccatcttcgtagctcagcgcatccggcaggaggatcagatctttttcttccgccagcaagtattcggcatgaccgccgtcacgctgccagccgtaagccgcttttccttcgccagtacaagaaataggaaaaccgcgacggcagttcgggcaaaaaccacagccagaaatgtgatacaccagcacgcggtcgccctctttaaaatggcggcagccttgccccatcgccacaatctgcccgcacggttcatgaccgttgataaagccctggtataacggtttatcgggtgccgccgctgtggcacggtgttgatgatagatatagtggacatcgcttccgcaaatcccggaggatttcattttgatcagtacctggttaatccccggcgtcggcaccgcaacttcccgcagatcgacggtgctatttcctggtaaataagctgccagcatcgttttcataaatccctcattaacaatacgattaattttcatccctgccgcacccgcgccaggggcgttaaggtttagcgtttcgctttactgcttcgctgggtcagcaagatattcgccagcaccgccaccacgatgatgacgccgcgtaccacctgctggaaaaaggagttaataccgagcagcaccagaccgttaccgattagcgtaatcaccagcacaccaagcaatgtaccgaacagggaaccgcgaccgccggaaagtgccgtaccgccgaccacgaccgcggcgatgacgtcaaactccagaccgtttgcggcacctgcgttaccagaaccgaggcgcgccgccaacaaaatgccggtcaccgccgctaataatccgctaagggtaaagataagaatgcgcacccgacgaacgttgatgccgcacaactgcgccgccgtagcattaccgccaacggcaaaaacgctgcgcccgaaggcggttttgcggctgatgaacacaaacagcgcaaacaacacaatcatgatcagcgcggataccggcacaccgagaaattgtccgcccagccagtccagcacctcgttttcatcaatcggcactggcagtgcgttcgtcataaacagccccattccgcgcagggcgctccacagccccagtgtggcaacgaaacttggtacattaaacacgccgcgcagcaccccggccagcgttcccatcagcgcgcctaacagcaacaccagcaggcacgccaccgccagcggaacttcaaattgcagcaaaaatgccaggcacacgctgacaaaagccaccatcggcccaacgctgacatcaatttcaccggagataataatcagcgtcatcgcccaggcggcaatcccaatggtggcggcatcgcgcagcacgttcatctggttattcaaactgataaagccaggcgcgttcagggagaagaccagataaagaatggcaatcaccaccagcaaaccgatctcattaatatggcgactgacaaattgtttgaggctgacgctcttgccctgcggcaatggtaaactgctagcagacatcttcaggttcctcggtaaaattcatcagtgcacagacagaatggcggacatcagctcatccacattgaccggagcgtgaaactcctggctgaacgtgccgtgctgtaataacaggatgcggtcacacaccagcggcaactcctccacttcactggagataaacaccacgctttttccttcggcagccagctcacggacaatacggtaaatctgctgtttggcttcgatatcgacgccgcgcgttggctcgtcgagcaacaaaatctggctggcagcatagacccaacgaccgatcaccactttttgctgattgccaccagaaagcgtgccgatgggtgtttcgctactggcggccttgaccgtcatccgctgcatcacctcttcggtcaggcggcggatggtggaccattgcagcacaccgttggcgctgattttttgccgattggtcagcactgtattttcgtcaacgcccaaccagggaatgatccccgcttctttgcggttttctggcgtatagccaatgccgcgtttcagcatgtcgccgtaatcggggcgcgtgattttctcgccgttgataacaatttcgccctgttcatactcctccagcccaacaatcgccttcagcaattcactgcgccctgcccccagcagaccagcaatgccgagcacttcgccacgacgtagcgtaaaactgatatcctccagcttgggcttatggcgtaacgcacggacttccagcacggcctgatccacaatttcctgaggggctaccggcgcaatatcaacgtgatcgcgcccgagcatcaggctcacaatatgatgcgtggaggtgttttcgagcatcacatcgcccgccacctgaccatcgcgcataacggtggcacaggaggcaatgcggcgaatttcttccatccggtggctgacataaatcaccgccacgcccagtgcgctcatctttttcaccgcgctgatcaccagttcaacttccgcactcgcaaggctactggtaggttcatcaagaatgaccacgcgcggctcgcccttcatcacccgcgcaatttccaccagctgcttttgcgccgggcttagcgtactaacaagttgttcaggactaacgtcaacgcccagcgcctgtaagcaacgttgggcatcctgcgccatttgcaggtaatcaatcatgccgttgcggcggggccactgaccgaggcagaggttttccgccactgtcagcccttccaccagacttaactcctgataaaccgcgcgcacccccagttcagcggcacggcgagtcagcgtagcttcgtcaccttccagtcgcgtctcgccaatccagatatcaccgctatccgggcgttcgctgccggtaagcattcgaatgagagtgcttttgcccgcgccgtttttacctaacagcgcacgaacttcgcctttattgagcgtgaagttaacgttatccagcgcaacgacgccgggataacgcttatttcctgccaccacttttgctaccgggactgcctctgttgccgtgaacatagggacctctgcgaatcagcgattagggcagaccatcaacgtgcgttgccagccactgtttaccgtcttccgttttggtatagagatcgataggcacctgaatcactttttcaccgtcggcttgtttattgataaccttcaatgtttgcgcgaaaacagcattgcccattttcttaccggaaatatccactaccgctttcagcacctgattgttttccagctcctgagcaatttcggttgtcatatcgctaccgaaaacagcaatttttccggcctgattttgattacgtaccgcttttaccgcgccgagtgtcgcaccgccgctttcccccataatggcgttgagatccggcgtggagataattagtttttcaccaacggaaatcgctttatctaaaacagtcccttcctgattagcgacaatttgcgcgccgggaacgcgggattttaaaacttcttcaaatcctttacgtcgctgcacacaaacttcaaaggcttcgcaattgatgacggcaattttcggctggtcaattttattggcaataaaataatcagcggcagcgttacccagttttttaccaaattccagcggatcgccgaccagatacgcgctgacatatttatcgacccccttttgattaatacaggtgttgtagcaaatcaccggaatgcccgcttcactggcgcgacgaacggtacggctactgccattttcagacactgcgcttaaaataatggcatcgacattacgcgccacgagggtatcaacaaaggtactttctttgctaatatcaccctgggcgttagtttctattaactgaacttgtacactggaatcttttgccgcatcctgaacgccctgacgcactccagcgtagtatccctgagtatcaaggtatattgcgccaatggtcatttctttttccgcagccctggcaaatagtgcgctacctaatagcgtagccattaataatagattacgggttgttctcatttttgtaggcatagagcctcctgtagggtttttattaacaacggcttattctaattattttgtgatgagcggcagcgcgtgccgctcaaatattacagttaatagggtttagtgaacgcggttaaaaataaaaggcatcacggtggtgaataatgccgctttcggccaagccggattaatcgccgtcaattcagcgcgagcagactcatattgcgcaacctccccgagtcccgcggacgccagcatcgccaccatcaggcatttttctttatgctgctgttgtaaatcgccatacaggctcaacaagtcaggttggctgacggcaaagaaatccgcttcgatactggttttcgccatctcttgcgcccactgtttcatttcactaaacagttgctgtgcggtttgttgttcgcccagcagtcgcagcgccatcccttgccagaagagataatcaaccggctgatcgttgtaataactgtgaatgttaatagtgcgatcgccggtcgccgccagacgtaaacaacgcgtcgcttcagtttcatcgccctgcgcgttggcgcatatcgcctgccagaaccagatgtcgttatcagtttgccccggtaaacggccttcgcttaaattctccggataatgcagcgcggcatgaagcagttcgcaggcctgctgcggctgtctggcatcaagatgctgccaggcgcgtaataactggttgaggataaactgactggtgaccttcccttccccgccttcccacgggtggaatttgcgcgtggcgagaatgtccgccgctttgtctgcctgacccgtgagatgccacaaattgagcagttctgcggtcatgtcgtcgcgtttcagcgcaatttccagattattttccagacgcgccagtcgtttctccggtgtggctccacttaacttatccagcaaatcccgttcgaaaagcagacgtgcatcctgcggcgcaagctgataagcattatcaagataacgcgcggccagctcataatcgtgttgcttattccacgcatggatcgctaacccgcgccagccgtcggcaaactccgggctcatctctacgcaacgttgccaaaaggcaatggctttgttgtagctacgtttgttgtagtagaagcaagctagtaaatggcgagcaaaccagcactcttcaatactctccagcgccgccacttcttccagcgtattcgggaaacggacaaactgcgggaagacatcaatggcttttgcgaccagttcgccacgttcggctttcggcagcaagctggcttgcaggtaaagcggcagcgtgcgctggcagtccagtgcgttcagcatctctgccgccagggtgggcattccccagttaatcagttgcccggcggtcatcagggcgttaacgtcgcgtccctgacacagaccgcgccactgcgcgagagcactttcgctacgaccatcgaaccagttcagccaccacagagtggcgttcagcggataatcgcgcagcagtttctcgcgctgcacacgcgcgttgtcctgacgaccacttaacaccagcagcagattatgcaggcaaagcacttcctgattggttgggcaggcgcgaagactttgttggcaaaaatccagaccagcgtcgaagttaccattacgcgccgccagtcgtgccaggccataatagccaccggctttgctgttgccgctccagaccgcacgccagaaatcctcttcggcttgttgatattgtccctgacgttcgtaagcactggcgcgaatcaaactcgcctgtccgcactgcggatttttgttcagcgcatgtgcgcgtttcagagcctgagtggcatacgccaccgcttgcgggaaatctgcgcggttatattccagcatcgccagcgccaggttacagcgataatccagcgggtccagcgccacgccgcgcaggtagtaatcgaacggactacggctggcgtgatgatattgctccagatgctgaccgataaaccaggcttcatctgtactggtaatgtcttgtgctgccagtggcgctttggcgacgtccggtaacggcaacgcttgcggctgatgttcctgataactcagtacaatattgccgtcggcatcggagagctcaatggtcagcctttcaggattgataccgtgcaacacgccctggatggcggtcgcaggcatcagtgccacggcatcatcaagtaacgcgttgcatttaccgatttcgcggatcgccaggcggtatccgttcaacggagagatggcatacagcccccactcaatcccccgcttactacgctggagttttatcaccgcatcgcgggaggcattttgcaccatgcccaaagaatgataaggcaggaaatactgctcaaaacgcttctcttcgtaagcatcaagccaggtaaaatcgggctggttatcggcaaaaataccggtcatcagttcgatatacgggccgttattgtcggtcagactcttatcccacgcctggccaaattcactgtgtccccaactccactgttttttacctggcgcaatatggtggttggcaacgtgcagcaaaccgccatcttcatcgtgacaccacgcgccgacaaaatcgtactggcttttttcggccatataactggttggaacaggcacatttttatagcgagaaatgtccactccagcggagtagtccactttgtagtaagtgccggtagcgatggggaaagcggagacggcccgtttgccgtgatcaaacaccgccgttacatccggcgggaagacgctctgatgcccttccccccctttcactgccgggttggcccaccacaagaaatgacgcggcgtggcgttcccgttatagacgcggctggcgatttccagcgccgcccggtcagggcgcagggtgaaacctgtcatcacctgtaaaccatgcatcggctccgtttcgcctacccacaccgtctgtgcaccgtcttcatgggcttcgagggtgaaatcaacgggcataaaggtggtcgggcgatgatgttgcggccagttaaactcaatcccaccggaaatccacggccccagcagccccaccagcgcaggtttaatgacttcattgtgataaacaaaatcgcgctgtttcactttatcccacgcgcgatgcacccgaccgcccagttccggcaggatcatcactttgatgtagtcgttttccagccacaccgcctgccaggatttcagggttttctgctcgctcagcgtatcggtcacgccgtagggataaaccgcgccggagcttccctgataaacgcgattttccaggaacatgggatgtatatcctgcggcccggtttcataggtcgggatctcaacgcgctcttgccacacttttactggagtcatggtgccctcaatattaacaagacatactgaattaaaagatttgtggcagtgtattgaacaatctggcaatgttttcgcggaataatcacgcaattaactaaacaaggtttagtgaagatgagagcctgcattaataatcaacagattcgccaccataacaaatgcgtgattctggaactgctgtaccggcaaaagcgcgccaataaaagtacgctggcccggctggcgcaaattagcattccggcagtcagtaatattttgcaggaactggaaagcgaaaaacgggtggtgaatattgacgatgaaagccagacgcgcgggcatagtagcggtacatggctgattgcgccggaaggtgactggacgctgtgcctgaacgtgacgcccaccagtattgagtgtcaggttgctaatgcttgtttaagtccgaaaggtgaatttgagtatttacagattgatgcaccgacgccgcaggcgctgctgtccgaaatcgaaaaatgctggcatcgccaccgtaaattgtggccggaccataccatcaacctggcgttggcaatccacggtcaggttgatcctgtgaccggcgtgagccaaaccatgccgcaagcgccgtggacaacgccggtggaggtgaaatatctgctggaagagaagctcggcattcgggtgatggtcgataatgactgcgtgatgctggcgctggcggagaaatggcaaaataatagccaggaacgggatttctgcgtgatcaacgttgattacggcattggcagcagcttcgtgattaacgagcaaatttatcgcggcagtttgtatggtagcggacagattggtcacaccatcgttaatccggatggcgtcgtctgcgactgtggacgttatggctgcctggaaactgtcgccagcttaagcgcattaaaaaaacaggcgcgggtatggctaaaaagtcaaccggttagtactcaacttgatcctgaaaaactgactacagcgcagttaatcgctgcctggcaaagtggagaaccgtggatcaccagctgggttgatcgctctgccaatgccattggtttgagtctgtataacttcctcaacatcctcaatattaatcagatttggttgtacggtcgcagttgtgcctttggtgagaactggcttaatactattattcgccagacaggatttaacccgttcgaccgcgacgaaggaccgagcgtgaaagcgacgcaaattggctttgggcaattaagccgcgcacaacaggtgctgggaattggctatttgtatgttgaggcgcagttacgacagatttgatggcgcgataacgtagaaaggcttcccgaaggaagccttgatgatcataaacgaaaaattgcctgatgcgctacgcttatcaggcctacacggagattgcaatatattgaatttgcaaagttttgtaggccggataaggcgttcacgccgcatccggcatgaacaacgagcacattgacagcaaatcaccgtttcgcttatgcgtaaaccgggtaacgtgcgcagatgtcgagaactttacctttgatgcgctcgataacggcttcatcattgatgctgtccagcacgtcacacatccagccagccagttctttcgcttcggcttctttaaagccgcgacgggtaatcgccggagtacctacacgaataccggaggtcacaaacgggctcttcggatcgttcggtacgctgtttttgttgacggtgatgttagcacggcccagagcggcgtctgcttctttaccggtcaggtttttatcaaccagatcaaccaggaacaggtggttatcagtgccgccggaaaccactttgtagccgcgctcgaggaacacttctaccatcgctttagcgtttttagcgacctgctgctggtaagttttgaactcaggctccatcgcttctttcagagcaaccgctttaccggcgattacgtgcatcaacggaccgccctgaccaccagggaaaacggcagagttcagttttttgtacagctcttcgctaccacctttcgccaggatcaggccgccgcgcggacccgccagggttttgtgagtggtggtagtaacaacgtgagcatgaggaaccgggttcgggtagacgccagcagcaaccaggcccgcaacgtgcgccatatcaacgaacaggtaagcaccgatgctgtcagcgatttcacgcattttcgcccagtccaccacgccggaatatgcagagaaaccaccgataatcattttcggcttgtgttctttggcttgtttttccagatcggcgtagtcgatatgaccggtagcatcgataccgtaaggaacgatgttgtacagtttaccggagaagttaaccggagaaccgtgagtcaggtgaccgccatgcgccaggttcatacccagaacggtatcacctggttccagcagcgcggtgtagaccgcaaagttagcctgggagccggagtgcggctggacgttagcgtagtcagcgccgaacagttctttcgcacgatcgatcgccagttgttcaacgatatcaacatactcgcaaccgccgtagtagcgtttgcccggataaccttcagcatatttgttggtcagctgagaaccctgcgcctgcattacgcgcgggctggtgtagttttcggaggcgatcagttcgatgtgctcttcctgacgtactttttcctgctccatagcctgccacagttcggcatcataatcggcaatgttcatttcacgctttaacatccgcatctcctgactcagctaacaataaaatttttggcctttataggcggtcctgttggacaacggcgaacagtataaccgaatcattgtgcgataacaggtcttgacaaaggaatttacgcaaacgattaccttcaggctacgcaaggctttggagaataaagagcttgcaaccggaaacggatttcttttcaggtttgtgatgcaaatttttcacttcatcacattctttctgaaaaacaccaaagaaccatttacattgcagggctattttttataagatgcatttgagatacatcaattaagatgcaaaaaaaggaagaccatatgcttgacgctcaaaccatcgctacagtaaaagccaccatccctttactggtggaaacggggccaaagttaaccgcccatttctacgaccgtatgtttactcataacccagaactcaaagaaatttttaacatgagtaaccagcgtaatggcgatcaacgtgaagccctgtttaacgctattgccgcctacgccagtaatattgaaaacctgcctgcgctgctgccagcggtagaaaaaatcgcgcagaagcacaccagcttccagatcaaaccggaacagtacaacatcgtcggtgaacacctgttggcaacgctggacgaaatgttcagcccggggcaggaagtgctggacgcgtggggtaaagcctatggtgtactggctaatgtatttatcaatcgcgaggcggaaatctataacgaaaacgccagcaaagccggtggttgggaaggtactcgcgatttccgcattgtggctaaaacaccgcgcagcgcgcttatcaccagcttcgaactggagccggtcgacggtggcgcagtggcagaataccgtccggggcaatatctcggcgtctggctgaagccggaaggtttcccacatcaggaaattcgtcagtactctttgactcgcaaaccggatggcaaaggctatcgtattgcggtgaaacgcgaagagggtgggcaggtatccaactggttgcacaatcacgccaatgttggcgatgtcgtgaaactggtcgctccggcaggtgatttctttatggctgtcgcagatgacacaccagtgacgttaatctctgccggtgttggtcaaacgccaatgctggcaatgctcgacacgctggcaaaagcaggccacacagcacaagtgaactggttccatgcggcagaaaatggcgatgttcacgcctttgccgatgaagttaaggaactggggcagagtctgccgcgctttaccgcgcacacctggtatcgtcagccgagcgaagccgatcgcgctaaaggtcagtttgatagcgaaggtctgatggatttgagcaaactggaaggtgcgttcagcgatccgacaatgcagttctatctctgcggcccggttggcttcatgcagtttaccgcgaaacagttagtggatctgggcgtgaagcaggaaaacattcattacgaatgctttggcccgcataaggtgctgtaatttgatgttgccggatggaaacatccggcaacccttgacgcggtttaaattgccgcgtcgtcctcttcaccggtacggatgcgaatgacccgtgccacgtcaaagacgaagattttaccgtcaccgattttgccggtttgcgccgtgcgaataatggtatcgacacaggtatcgacaatgtcgtccggtacgacaatctcaattttcactttcggcagaaaatccaccatatactccgcgccgcggtacagctcggtatggcctttctggcgaccaaagcctttcacttcggtcaccgtcatgccggtaataccgacttcggccagtgcttcgcggacatcgtccagcttgaagggttttataatcgcatcaatctttttcatgctattccttgaaaaggtcgcctgtcttttgatctgctaaacgtaacacataacgccaattcattccttgaaatcgtttgcatccagctcgtgtcgggaaagcagtttataaaattctgtccggttgcgccccgccattctcgccgcgtgggtgacgttgcctttggtgatttgcagcagcttacgcaaatagttgagttcaaactgattacgtgcctcaacaaaggttggcagcgccgtattttcaccctccagcgcctgctccaccagcgcatcactaatcaccggagaactggtcagcgccacgcactgttcaatcacgttgaccaactggcgcacattacccggccagctcgcggtcatcaggcgtttcatcgcatcggtagagaacgcgcggacaaacggtttatgtcgctctgccgcctggcgcaacaggtgatttgccagtagcggaatgtcttctgtgcgctccgccagtgccggaattttcaggctgacaacgttgaggcggtaatagagatcttcgcggaattccccgcgcgccatcgcttttggcagatcacggtgagtggcagaaataatccgcacattgatatcaatatcgcggttactgcccagcgggcgcactttacgctcctgcaacacgcgcagcagtttgacctgtaacggcgcaggcatatcgccaatttcatcgagaaatagcgttccgccttccgccgcctggaataaaccttcgcgattgctgacagcgccagtaaacgcgccacgcgcatgaccaaacagctcgctctccagcaattgctcgggcaatgcgccacagttaatagcaataaatggtttgctgttgcgcgggctggcgttgtggatagcctgggcgaaaatctctttcccggtgccgctctgaccgttaatcaaaacgctgacgtcactttgcgccaccagccgcgcctgttccagcaaacgcagcatcagcgggctgcgggtgacaattgcctcgcgccagcgttcatcggtggctggcgcggattgctccagcgcatcgtcaattgcctgatatagcgcgtctttgtcgacaggcttggtgaggaaactaaaaacgccctgctgtgttgcagcaacggcatcgggaatagaaccatgcgcggtaagaataattaccggcattcccggctgcactttctggatttcagcaaacagctgcataccgtccatttcatccatccgcaggtcgctgatgactaaatctactttttcgcgattcagtacccgtaatccttcagcgccactttccgccgtgaccacactgtagccttcgctggtcaggcgcaggccaagcagtttcagcaatcccggatcgtcatcgaccaataataaatgcgcaggtttatggctcatcaggagtgacctcatgggtggatggcgcgggcttttcactctcgtgcggcgtatccgggctgaaatttccagccggtttgcgggtgctgagctggcgttcaatatcggtcaggttttccagcttgcgggtggtgagttccagttgctgctgtagaacgtgatgttgctggcgcaatgtatccagctcgctgtcgctggactgctggagtttactgtaacgttggcgctcttccgccagttgcagttgcagcgcctgaccatcgcgccagagttgatacagtgggcgaacctgtgccgggatctcggtacttaacgcttcaatacgcgcgaccagctggcggcgctcatacggcgtaattttggcgtcggcgagcaaaatcccttgtttaaaggtattttgccagctgccgtcgtcatattggcgagcttgctgacggctctgcgcaggcattaaacgatcagcacaatccatcgcccgcagccagtaaagcggattggtttcggtacttttaccttgcagcgcccagatgtcgctacattcagtagaaagatagtcagccagttgataaaccggaattttttcttctgctggcgtatcaatggctggcttattgtgattctgcacgcaacccagcaatgccagacatggcagccctgccagccacagccgtcggggcaataatcgttgaaaaatgtgtcgcatattcaccagacttaaagcctatcccagtgggcgtaattgttgcagacagtctggacatggacagcgcggagaaaccggagcgtacatatcgtacgtgaagatttcgagcactgcccggggccgaactgacaaataaaatagcctgataggataggctgttagcattatttcgtgtttttgctgctcggtaattcaatgcggaaacaaacgtcttgcccgctctcgtcgaccagatacagttccccttgcatacggcgaatacaatccctggcaatgcttaatcccagaccgctgcccttcaccgccccttttcgctggtggcttccctgaaaaaagggttcgaagatcatggcgcgttcctcttgcggaatgggcgtgcctgtattgatgacatcaatataaacccgcgcaccatgtaaactgctgcgaaggcaaatgttaccggattcagccccgtagtgcaccgcattggagtaaagattatccagtacgctcatcagcagcattggctccgccaggcaagctgttgctttgagatcgacgtcggtatgcatcattttagcccgtgcgggcaggctatgagcagaaaccactgtctccaccagcggtgctaactcaacattctccagttccaccgcactgtccgcctgtttacggttgtaatcaagcagttgttcgatcagtttttgcaaattgcggctgctgctatcaagaatgctcaccacctctttttgctctggcgtaagcggcccgacaacctggtcagccagtaattcagtgccctcgcgcatactcgccagtggcgtttttaattcatgagataaatgtcttaaaaattgatggcgttgggattccagccaactcaggcgctcacttaaccaaagaatacgttgcccaacgctgcgtaactcgctcggtccactgaagctgacgctattgcccagagaacgcccttcccccagacggttgatcatgcgctcgatatttttcaccggcccgataatcatccgcgtgaaaagcagtaccattaccagactcaccagaaatagcaccaggctttgccaaccaaaatattgcccacgttcggcgatttcacgctgaagctgctgcccacgagagaacaccactgtgcgcgtggcctgtaccatttcggtattggcactggcaaaggcttcaagacgtgcggcggcggcagcatcgggaccgctgttgttacactgaagttgagccagattgtgcaaatcctgacgtaatgcctggtagagtttatcgtccggcagcacgcctgcgtgggcatcgagcatttcgctgtaacgcttgcgctggctttgataaaccttcgccagggttgggtcgtccagcacgcaatactgacggtaactacgctccatctccagcgccgcgttggtcatcgcttcactgcgccgggcatcaataagcgtagtgcggttaaccagcgccgcctgatcgctaagcgcattcaggctttgccaggcttgccatgccagcaccaacaggggcagcagaatcagcaaaaatgccagcattaccagttgtcgtaaactgcggggaaaaacgggccagcgtttcaaggtgttactctcgtcagacgcgaatagcctgatgctaaccgaggggaagttcagatacaacaaagccgggaattacccggctttgttatggaataaggcggtgcctaactcgacgtttcgcccgatggttgatatagctacgctgatatcagaagttggacggcaggcaccttgttgtgcgtcattcgtattttatgtagcacgtcccgaaggggctgacataagtcggtgaatgagccactggttactattatgcagtaactgtgccaataaagaaaatagtttggtaacgtactgattatacgttgctttgaggggtttatgtctcctccgctgtttgaatgtaaatcagccactgtgtcgctaaaaagagacaacttaagataaacttattagataatattaaaatcaatgagttaagtgtcgccagaaagcgacacggcaaaccacccattgtcgtgatttacagacacaaaaaagctcccggagttgggagcttatgatagtggttggtgcttaatgccgcatccgggctgcaaaaccaatgggctgacgacttaccccaactgcttacgcgcattgcggaaaatgcgcatccatgggccatcctcgccccagttttccggatgccaggagttgctgacagtacggaaaacacgttccgggtgcggcatcataatggtgactcgaccactttcagtcgtgactgccgtaataccgttcggactaccgttcgggttagccgggtaggtttcagtgactttgccgaagttatcgacatagcgcagtgccaccagccctttgctttccagtgccgccagatgcgccgcatcacgcacttccacgcgcccttcaccatgagagacagcaatcggcatttggctgcccaccatcccctgcaacagcagagacgggctttgggttacttcaaccaggctgaaacgcgcttcaaagcgatcggaggtattgcgcacaaaacgtggccacaactcactacctgggatcagttcacgcagattagacatcatctggcaaccgttacatacccccagcgccagcgtttgcggacggtggaagaaggttgcaaactcatcgcgtacacggtcattgaacaggatactcttcgcccaaccttcaccggcacccagcacatcaccgtaggagaaaccaccgcacgcgaccagggcgtggaaatcttccaggcccgtgcgtccggtcagcaggtcactcatatgcacgtcgatagcatcaaagcctgcacggtggaaagctgccgccatttcaacatggctgttcacgccctgctcacgcagtacggcaactttcggacgtgcgccagtggcaatatacggtgctgccacatcttcgttgatatcgaagctcagttttacattcaggcccggatcggcgtcgttagatttcgcctgatgctcctgatcggcacactccgggttgtcacgcaggcgctgcatctgccaggtagtttctgcccaccagacacgcaacgtggtgcggctttcgctgaatacagtctgcccgttggcggtaatcacaaaacggtcaccggaaaccgcctgccctacataatggacacaatcagcaagcccatgctgtgccagtacggactcgaccgcttcacggtcagcggcacgaacctgaatcaccgcacccagttcttcgttaaacaacgccgccaggcgatcgtcacccagagtggcgatatccgcgtcaatgccacaatgaccagcaaaggccatttccgccagcgttaccagcaggccgccatcagagcggtcgtgatacgccagcagcttacgctgtgcaaccagcgcctgaatcgcgtcatagaagcctttcagttgcgcgacatcgcgtacatctgccggtttgtcgccaagctgacgataaacctgcgccagcgccgttgcgcccagcgcgttattgcctttgcccaaatcaatcagcagcagtgcgttatcttcggtagaaagctgcggcgtgatggtgtgacgtacatcttccacgcgggcaaatgcagaaatcaccaggctcagcgggctcgtcatttcgcgctcttcgttaccttcctgccagcgggttttcatgctcatggagtctttacccaccgggatcgtcaggcccagcgccggacaaagctcttcgcccacggctttaacggcttcatacaggcccgcatcttcaccagggtggcctgccgccgccatccagttggcggaaagtttgatgcgtttgatatcgccaatttgtgttgcggcgatgttggttaacgcttcaccgaccgccagacgggcagaggcggcgaaatccagcagcgcaaccggcgcacgctcgccaatcgccatcgcttcaccgtagtagctgtcgaggctggcggtagtgaccgcgcagttagcgaccggcacctgccacggccccaccatctgatcgcgcgctaccatgccggttacgctgcggtcgccaatggtcaccaggaaggttttttccgccacagtcggcagatgcagcacacgtttcaccgcgtctgcaatggtgatcccttcacgggccagcgcgtcgcctttcgctttcagcgtttgtacatcgcgggtcatcttcggcgttttaccaagcaggacgtccagcggcagatcgatcggctgattatcaaaatgacgatcgtgcagagaaagatgcagttcttcggtcgcttcaccaatcaccgcgtagggtgcgcgctcacgcttacacagttcgtcaaacagcggtaattgatcggcagcaaccgccagcacgtagcgttcctgggattcgttacaccagatttccagcgggctcatgcccggttcgtcgcttagaatctcgcgcagttcaaatttaccgccgcgcccgccgtcgctcaccagttccggcatggcgttagaaagaccgccagcgccaacgtcgtggataaacaggattgggttggcatcaccaagctgccagcaacggtcgatcacttcctggcagcgacgctccatctccgggttgtcgcgctgtacggaagcaaagtcgaggtcggcatcagactgaccagacgccatagaagacgctgcaccaccgccaagaccgatgttcattgccgggccgccgagaacgaccagcttcgcaccgacgttgatctcgcctttttgtacgtgatcggcgcgaatgttgccgatcccgcccgccagcatgatcggtttgtgataaccgcgcagctcttcgccgttgtggctgttcactttttcttcataagtacggaagtagccgttcagtgccggacgaccaaattcgttgttaaacgccgcgccgcccagcgggccttcggtcatgatgtccagcgcggtgacaatgcgctcaggcttaccgaaatcttcttcccacggctgttcgaagccaggaattcgcaggttggaaacggagaaaccaaccagacccgctttcggctttgcgccgcgcccggtggcaccttcatcgcggatttcaccgccggaaccggtcgccgcgcccggccacggagaaatcgccgtcgggtggttgtgagtttcgactttcatcagaatatgcgccggttcctgatggaaatcgtagcggcccgtttcgtggtcagcaaagtagcggcccacttcagaaccttccattacggcggcgttatctttataagcagagagaacgtgatctggcgtggtttcgaaagtatttttgatcatcttgaacaggcttttcggctgctgttcaccatcgataacccagtcggcgttaaaaattttgtggcggcagtgctcggagttcgcctgggcaaacatatacagttcgatgtcgttcgggttacgaccaagctttgtgaaagcatcctgcagatagtcaatttcatcttccgccagagccaagccaagacgcaggttagcgtcgatcagcgcctgacggccctgccccagcaaatcaacgctggtaaccggagtcggttgatggtgggcaaacaactgctctgcatcatctaaagcaaaaaagaccgtttccatcatgcggtcgtgcagttcagcggtaacctgctgccattgttcattggtcagcgtaccggcttctatatagtaagcaacgccgcgctcaaggcggtttacctgttgtagcccgcagttatgggcaatatcggtcgctttgctagaccagggagagatggtgccaggacgcggggtcaccagcaggagtttgccttgcggggcgtggctggcgagtgccgggccatatttcagcaggcgttcaagttgtgcgtgctcatcatcgtttaacggcgcattgaggtcagcaaaatggacatactcggcgtaaatattgtgaaccgggagcctggcagcctgaaaacgtgccagcagtttgttgattcggaatgcgctcagtgcagggctaccacgcagaatttccatcataagtctctcgtcttctaagctttcggtgtacccaagggggggaaacgggcgtcattataaagaatctgatgcgctgacgaaaccgtttgcgtggaaataaaatcaccatcgtgaattagcaacgcgtgccgccaatggctgtaataagttgccatctggcgcaggtttacgcaaaatgccgctcatttatgagtaaacctttcactattattacgttttttcaagctgggacgcgcacgacacagagaattaactaattgaaaaaattaaagattaattatctgttcatcggcattctggcactgctgctcgcggtcgctctctggccatccattccctggtttggtaaagccgacaaccgtatcgccgccattcaagcgcggggagagttgcgtgtgagcaccattcatactcccctgacttataacgaaatcaacgggaaaccttttggcctggattacgaactggcgaaacagtttgccgattacctcggcgtaaaactgaaagtgaccgtgcggcagaatatcagccagctgtttgacgaccttgataatggtaacgccgacctgctggcggcaggacttgtctataacagtgagcgggtaaaaaattatcagcctggccctacctattattccgtgagtcaacaactggtttataaagtgggtcagtatcgcccacgtacgctgggcaacctgacggcggagcaactcaccgttgcaccgggtcatgtggtggttaacgatctccagaccctgaaagaaacaaaattcccggaattaagctggaaggtagacgacaaaaaaggctctgcggaattaatggaagatgtcatcgaaggaaaactcgattacaccattgctgattctgtcgccatcagcctgtttcagcgcgttcacccggagctcgccgtagcgctcgatatcaccgatgaacaaccggtgacttggtttagcccgttagatggcgataataccctttccgccgccctgctcgacttcttcaacgaaatgaatgaagacggtacgctggcacgcattgaagagaaatacctggggcatggcgatgattttgattacgtcgatacgcgcacatttttacgcgccgtcgatgcggtactgccgcagttaaagcccctgtttgagaaatacgccgaagaaattgactggcgtttgctggccgctattgcttatcaggaaagccactgggatgcacaggccactagtccgacgggtgtgcgcggcatgatgatgttaaccaaaaataccgcgcaaagcctcggcattacggatcgtaccgatgccgaacagagcatcagcggtggcgtgcgttatttgcaggatatgatgagtaaagtgccggaaagtgtgccggagaacgagcggatctggtttgccctcgctgcgtacaatatgggctatgcgcatatgctggatgcccgcgccctgacggcaaaaaccaaagggaatcctgacagttgggctgacgtaaaacagcgtctgcctttacttagccagaaaccctattacagcaagctgacttacggctacgctcgtggacatgaagcctacgcttatgtcgaaaatattcgtaagtatcagattagcctggtgggttatctgcaagagaaagagaagcaggctacagaagcggcgatgcaactggcgcaggattatccggcggtaagccctacggagttgggcaaagagaaatttccttttctcagctttctttcccagagcagtagtaactatttgacccattctccctctctgctgttttccaggaaagggagtgaagagaaacaaaattaatccgtgctggattgcgcttttttctgcgctttaatttcctggcggcgcatgcgaaagaagtcactgagcaacgccgcgcactcatccgccagtattccttccgtaatttccactcggtgattcatacccggatgatgcagcacatccattaaagatcccgcagcgccagttttcgcgtcacgcgcaccaaagaccacgcgaccaatgcgactgtggatcatcgctccggcacacattacacatggttcaagcgtgacatacaacgtggcgtcgatcagacgataattttgcatcaccagaccaccctgccgcagggccatgatttctgcatgtgcggtgggatcatggcgaccaatcgggcggttccagccttcgccgattacccgattgttatgcactaataccgcgccgaccggcacttcccgctcatcccaggcacgtttcgccagcgtcagcgcgtgacgcatccagtattcgtggctaaattcgacttcagacaaaaagaaaactccggttataaaagcgcggcgcattatacacggacgctatgctttactttattccagttgctggagttcaccgcgcggggttactcgccaacgatgctgacagaaataaagcagcggattgtcctgattactgtcgctatagccactgtacagccgcagcggagtgccgattttgcgctccagttgtgcgaccttttcatgtcccagacaacgcatcgtcaatacccaaccaccatagccacgctgaatttggctggcgataagattaacccgcggcagccagggcgtatcgaaataaaccgcttcaaccagcggctgcggagagccggtaatcaaccagatatcagcatcggaacttaacaggtaggtggttaatcgctcctgaaccagcggaaaggcggtaacattgtcgcgaaaccagcgcacgaaatcggcctgcaacgtctgtaaacgtgcttcgctgtgaccaaaagtgcacccccacagaagcagactcatcggccagcgtgccgcacgaccttttatcaataacgcaatggctataatcggtaacaacggcaggacaagtaacgcattcagcggttggcgacgtagtaaatagcgcagaaaactgccgaacatatcctgctgatgcaatgttccatctaagtcaaaaaacaccacacgacgctcgtgagttgccaaaccatattcctctggactgaaacatcctgattaattttcgctactacatagcctaacagatagatcatcacttttccggcaacaatcgaccgcatcatggctaactggaatttttaattcatggcaattagcggcaatggaatataaaattcactcgcgtgtgtctcatattgcctgttgtcgccactatttcatcgcgaggaaagatatgaacggcttacttcgtatccgtcagcgttaccaggggcttgcccagagtgataaaaaactggcggattatctgctgctacaacctgatacggcgcgccatttaagctctcagcaactggccaacgaagccggagtcagtcagtccagcgtcgtgaagttcgcgcaaaaactcggctataaaggttttccggcgcttaagttggcgttgagtgaagcgctggcaagccagccggaaagtccctccgtgcccattcataaccaaatccgcggtgatgatccgttacggctggtcggcgaaaaactgattaaagaaaatactgccgctatgtacgcaacgctaaacgttaatagtgaagagaaactgcatgaatgcgtaacaatgttgcgctctgcgcggcggataattctgaccggtattggcgctagcggtctggtggcgcaaaactttgcctggaagctgatgaagattggcttcaatgctgccgcagtgcgcgatatgcatgcgctactcgcaacagtacaggcgagctcccctgacgatctgttattagccatttcctacaccggtgtacgacgcgagttaaacctggcggcagatgagatgctgcgagtgggcggaaaagtgctggcgattaccggctttactccgaatgccctgcaacagcgtgcttctcattgcctgtataccattgccgaagaacaagcgacaaacagtgctagtatctctgcttgtcacgctcagggaatgttaacggatttgctgttcattgcgctgattcagcaggatctggaactggcaccagaacgtattcgtcatagtgaagcgctggtgaaaaaactggtctgagtaaagaatgcgcgtataatgcccgcccggtttgtgttgttttgagagtttccttatggcgttgttaatcactaaaaaatgcatcaattgtgatatgtgtgaacccgaatgcccgaatgaggcgattagtatgggagatcatatctacgagattaacagcgataagtgtaccgaatgcgtagggcactacgagacaccaacctgccagaaggtgtgcccgatccccaatactattgtgaaagatccggcgcatgtcgagacagaagaacagttgtgggataaatttgtgctgatgcaccacgcggataaaatttaatattctactctggaagtagagtattaattatattactgggaagccttaacgccattatatttatttaattgatgacattagcataatcattcactaagttaatttatatagtatctgcccagacacttatttatagttattaaaggtgcgtccgactggttcaccggacgcaccttaagtacgtttccttgtgttataagaacagaaggatcagctgtaaaacagcaatgatgattttgatgacccgtttaatcaggtatcggcaatcagtcattcgtttttccttaaacaaggaatgcagccattcagattagcccttacatctccccaaaactgaacgtgcgagttattgagggtgcatgctgcactccacaccagagctttgacgacaccactcgtttcaatgggggaattctgtggcatggtgtaaagcacagcaaaatcttcaataacgaagccaattttaatgtacttacgaattggcggtcacgttaatctttccatcaatattgctttcttcgtaaaggctcgagtttttatgctaaagattgcaagttgcttgtaaaagataagtacactgatccataatcgctgttgttgagggtgcatgctgcacaaaattaaagttaaaaagtaaaacccccgttccttaccagttcgggggttttactttttaaagagaacggtattatttttaactttcaataattaccgtggcacaagcatagtgccgctcatctgccagcgttacatgcatatttgcaacgcccagcttttccgccagttttaatgcctcgccccatagccgtagccgtggtttgccgagctcatcattgaatacttcaaattgattaaacgccagaccattgcggatcccggtgccaaacgcttttgctgcggcttctttcacagcaaaacgcttcgccagaaaacgcaccggctggtggtgcgttttccagatagcccattcgttatcgcttaatacgcggcgtgccaggcgatcaccggatcgggcgatcaccgcttcgatgcgagcgatctccacaatatccgtgcctaaacctaatattgccattagccacgcgcttccagcatcagacgcttcatttctgccaccgcatctttcagtccggtcatcactgcacgaccaataatggcatgaccgatattcagttcatgcatctcagggatggcggcaatggctttcacgttgtgataggtcagaccgtgtccggcgttaactttcagaccgaggcttgcggcaaaggtcgcggctttggcgatacgcgccagctcttgcgcctgttcggcgtcagttttggcatcagcatagcaaccggtgtggatctcgataaacggtgcgccaacctctgccgcagctttgatctgctcttcatcggcgtcaataaacagagaaacctgaatcccggcatctgccagacgtttgcaggcatcgcgcattttgtcacgctgccctgcgacatccaggccgccttcggttgttacttcctgacgcttttccggtaccaggcagcaaaaatgtggcttcgtctcaacggcgatcgccagcatctcttcggtcaccgccatctccagattcatgcgggtatccagcgtctgacgcaggatgcgcacgtcgcggtcagtaatgtgacggcgatcttcacgtaaatgcacggtaatgccgtccgctcccgcctgctcggcaataaacgcggcctgcaccggatccgggtaagcggtaccgcgcgcgttgcgcagcgtagcgatatggtcaatgttgacgcctaacagtaattcagccatgacaatcctcatcattcataatgtgttttcaccgttcgcttaggcataaactgccggaacagttccctgctctttaaaggtttaccgccaagatacggcttaagcgccatgcgggtaaagcgtttcgcggcgcgcagtgtgtctgcgtcaggaaattcccgtgcgtttaacgcttttaactgccttccggtgaacgttttattgtcgataacgacgcttgcgataaaccctttttcttcgcgataacgatacgtcatggtgtcatctaccggctcgccgctacccgcacaatgggtaaaattgacgccataacccagatgcccgagcagtgccagttcaaagcggcgcagcgcgggttctggcgtaccagtgacccctgcaagagactgaatgcagtgcaagtaatcgaaaaaaagttcagagaagcgcgtctcgtattccagtacgcgggagagaagttcgttgatgtacagaccgctgtaaagcgtgataccgcttaatggcagcgccaggctgacggcttcagcactgcgcagcgttttgacttcgccacgcccgccaaaacgtagcaagagaggggtgaaaggctgtaatgcacctttcagggtagagcgtttagagcgtgcgcctttggcaaccagacgcacgcgcccgctttcctccgtgaagacgtccagcatcaggctggtttcgctccacgggcgactatgcaggacaaatgcgcgctgccagccttccatcggagttactcttaaagatcgtcaacgtaaccgagactgcgcagtgcgcgttcgtcgtcggcccaaccggatttcacttttacccacagttcaaggtgaacaggcgcttcgaacatttcctgcatgtctttacgcgcttcaatcccgatggttttgatcttggcccctttgttgccaatgaccatcttcttctgcccttcacgctcaacgagaatcaaaccgttgatgtcataaccaccgcgttcgttagagacgaaacgttcgatctccacggtcacggagtacggcagttcagcgccgaggaaacgcatcagtttttcgcggatgatttcagacgccataaaacgctgactgcgatcggtgatgtaatcttccgggaagtgatgagtcgcttcaggtagatgcttacgcacgattgccgcaatagtgtcaacattcagcccggtttcggcagagattggcacgatatcgaggaagttcatctggcttgccaggaactgcaggtgcggcagcagatcggctttctcctgcacgttgtccactttgttcaccgcgaggattaccggcgctttgccttcgcgcagtttgttgagcaccatttcgtcgtccggcgtccagcgggtgccttcaacgacaaaaatcaccagctcaacatcgccaatagagctgctcgccgctttgttcatcaggcggttaatggcgcgtttttcttccatatgcaggcccggtgtatcgacgtagatcgcctgatacgcgccttcagtatggatccccacaatgcggtgacgagttgtctgcgccttgcgggaagtgatggagattttctgccccagcagtttgttcaacaatgtggatttgccaacgttcggacgtccgacgatggcaataaatccgcagtaacttttatcgatgctcattccagctccagttttttcaacgcctgttcggcggcagcctgctcagccttacgacggctactacctgtgccaaccaccggttcactcaggccgctgacctggcagtggatagtaaattcctgatcgtgcgcttcgccacgtacctggactaccagataagtcggcagcggcagatggcgaccctgcaaatattcttgcaagcgcgttttcggatctttttgtttatcgcctgggctaatttcgtccaaacgagtttgataccagttgaggattaatttctcgacggtttgaatatcactgtcgaggaatacgccaccaattaatgcttcgacggtgtcggcgagaatactctcacgacgaaatccaccgcttttaagttcacctggccctaaacgtaagcactcgcctaactcaaattcgcgcgccagttccgccagcgtattgccacggaccagcgtggcgcgcatccggctcatatcgccttcatccacacgagggaaacggtgataaagcgcattggcgataacgtagctcagaatagagtcgcctaaaaattctaaacgctcgttatgtttactgctggcactacgatgagttaatgcctgctgcaacagttcctgatgattaaaagtgtagcccagcttccgttgaagccgattaattacgatggggttcatgcgataccaataaataaatgcgtcaacaattcagcacacgaaacagacctgatatacatggttctgctaactgcttcgctgcagtttcagtttaccggtatatggggaccaacgctgtttcgtgtgccgtggcaacctggaggtgccaaccttaaacttcgggggaatattctatacacaacgacgggggatgtcgttagccacgggagatttatctcataaataattcacgttgtcgccataacggcgacaacgtgaacgaagatggctattaatggatgccgccaatgcgacttaagcgcagaccagtcggccattcgccttcttgcttatcgaagctcatccagatagccgttgcccgaccgaccagattcgcttccggcacaaagccccagtaacggctgtccgcgctgttgtcgcggttgtcgcccatcatgaagtattgtcccggaggaacaatccaggttgccagttgttgccctggctgctggtaatacatccccacctgatcctgcgcaatcggcactgtcagaatgcggtgcgtcacatcacccagtgtctctttacgctcggaaagacgaattccattttctttggtttcgtttttcggcacttcaaagaatccgctggtcgcttccccaccattacggcgactgaaggtctgaacgaaatcgctcggttccacgttactgtaggtgaccggcagcgcgttttcacacgcctggccggaactgcatcccggttgaatcgtcagctctttactgaccggatcgtaagtgactttatcgcccggtaaacccaccgcgcgcttgatgtaatcaagctttggatcttccggatatttaaagaccacgatatcgccgcgtttcggatgaccggtttcgatcagcgttttctggtagataggatctttaatgccataagcaaacttctctaccagaataaaatcaccaattaacagagtcggcatcatgctaccactcgggatctggaacggttcataaataaagctacgcacaatcaatacgatagccagtaccggaaaaacagaagcaccggtttccagccagccaggcttcggcgcaacctttttcaacgttgctttatccagactgtccccggcagccgcctgcgccgctgcctgacgttcccgccgtttaggtgcgaaaaagaatttatccacgcaccataaaatgcccgtcaccagtgtggcaatcaccagaatcagggcaaacatattcgccatgccaactcctaagggttatttgttgtctttgccgacgtgcagaatggcgaggaacgcttcctgcggcagctcgacgttaccgatctgcttcatgcgtttcttaccttctttctgcttctgcagcagctttttcttacggctgatatcgccgccataacatttagccagtacgtttttacgcagctgtttcacggtggatcgcgcaatgatgtgcgtaccaatcgctgcctgaatggcgatatcaaactgctggcgtgggatcagatctttcatcttctccaccaactcgcgaccgcggttttggctattatcacggtgggtgatcaacgccagcgcatcaacacgttcaccgttgattaatacgtctacacgtaccatgtcggacgcctggaagcgcttgaagttgtaatccagagacgcataaccacggctggtagatttcaggcgatcgaagaagtcgagcaccacttccgccatcgggatctcgtacgtcagcgccacctgattaccgtggtaaaccatattggtctgcacgccgcgtttttctacgcacaacgtaataacgttgccgagatatgcctgcggcagcagcatgtgacactctgcaatcggctcgcgcagttcgtagatgttatttaccgcaggcagcttggatgggctgtcgacgtagataacttctctactcgtggtttcaacttcatacactacggtcggcgcagtggtgatcagatccagatcgtattcacgttccagacgttcctggatgatctccatgtgcagcaggccgaggaagccgcagcggaaaccaaagcccagcgcgctggagctttccggctcatagaacagactggcatcgttcaggctgagtttacccagcgcgtcacggaaggcttcatagtcgtcggaacttaccgggaacagaccggcgtatacctgcggtttgactttcttaaagccaggcagcgccttttctgccggattacgcgccagcgttaaggtatcgccgactggagcgccgtggatatctttaatcgcacatacgagccagcctacttcgccacatttcagttcagtgcggtcaacctgtttcggcgtgaagatgcccagacggtcggcgttataggtctgcccggtactcatgactttcactttgtcgcccttacgcagggtgccgtttttaatacggataagactaacaacgcccaggtagttgtcgaaccaactgtcgataattagtgcctgcaacgggccttccggatcgccttccggcggcggaatgtcgcgcaccagacgttcgagaacgtcctgcacaccaacgccggttttcgcactacagcgcaccgcgtcggtggcgtcgatgccgacgatatcttcaatttcttccgccacgcgttcaggatcggctgccggcaggtcaatcttgttcagtaccggcacaacttcgagatccatttccatggcggtgtagcagtttgccagggtttgcgcttctacgccctgcccggcgtcgaccaccagcaatgcaccttcacaggcagccaggctacgggaaacttcataggagaagtctacgtggcccggggtgtcgataaagttaagctgataggtttcgccgtcagacgctttgtagtccagcgtcacgctttgcgctttgatggtaatgccacgctcacgctcaagatccatggaatcgagaacctgcgcctccatttcacggtcagacaggccaccgcagatctggataatacggtcagacagcgtgcttttaccgtggtcaatgtgagctatgatgctaaagttacgtatattcttcataaagtatgattattgtgccttaatgcccggttaaccaggcttttagaagtcgctgttctgagcttaacgtctgtattaatagaaacgccgcattctacactacaacattgaggcgaggaaatgttcataccgtatggattgtggtatctggaaacgtcctcgcatttgttatgcaaaatgcaacaaagccagtgaaatcactggctcgcgtcttcgctagatgtttcaaatcgcacaaggccaggcggcaatgccacgcttaagatgatcggttgccattctgcccgggcagcaaacttacggctgtagccgcgcgcaatcaggaacccgccaataccaccgaggatcgcaccacataatgctgcgacgtcagaagcaaagagtagctgaaataggctagcgataaggaataatcccaccagcgggctcatataaaccagtaatgcggagctaagcaggctgccttcggcgatccccaattccactttttgccccggcactaacggctcatcacagggtacgacaatggtatgcgtggtttgcgggccaagtttatttaacacgcggctaccgcaaccggcgcgactagcgcagctgctgcaactagctttaacatcacaactgaccagcgcctgcccgttttgccaggagacgacggtagcccactctttgatcattgcgctgccccgaacttaatattctcggcaatgcgtttcgccgtttgcggcggcagttcaccgacaatggtgatttcggcgttatcacgtacgcttgtactgacggttctgcgtccggtgcgcaacatctgatcggtgctgcttggcgtagcgcggttaacgtttacgctgaagctgaataatccgtcggaatagagacgactttcgataggcatgttgtccatcgtcggtagcggacgtcgactactggaaacttcgctaaaaccctgtggcaaccaggttggcgtccagctgaatttagctttttcacctacaggaacagaaagcaacggcggcaaatttgccttcgccagcgtctgcatactgctgctgatatcctgattgacgttaaaagcaatcacgcgaaattgttccagcgtttcaccatcgcgatcaaggagatcaacccgcatcggtaatttgctttcggtgtccatccacacgatgtagctgtagcgtgtaccatctcgggcaaccacgcgaatgacttcgcaaagacgatcagcaatacgcgtgcgcccgacggagataaagtcgtagtaaggagaaaggcgtttgaaatcggtatagataaggcttggcagagaatcaacaatgtaatcgccattaagcgtgaacggttcaagtcccggttcaaaatagctgatttcattgccgcgctgtaccacttcccggcgcgggccatccatttgcaacaattgtgcaagaggacggttatcgaggcgtgcatgtcgataacgcagagactcaacaccctgtttattgatgctgatgaaactcagctcgtaattcagactctgactggccaggttcatctgctgtaataacgccccggacgcgggagtggcgctggcgttagcagagaataacaggctacctgtcactaaactcatggcaaaccaaagttgcttcattactggctttgcgttcctaaagtttgaattcctggcacctgtacagcggcttgctgggtttgcgcctgctcaaactgaagctgttcagagtggagtcggcgttgcagttcgtaatcctgcaacattgcattaatgcgacgacgctgctcctgtacctgctgctgttgaccattgtttgcggtcgcttcagaaggtactcccaggcttaccgggctggctttacccatcatcggcagtgtattaaataccggcgtttcgggctgctgggacgtttcagattgtccattatagtgctggacgccaacgataactgcaaggcttacgcatgcggctacgcccatttgggtaagctgtgccgcccacggacgtactttctgccagaatggcattttctgccattgatgcggcgcaggctgggcttccgggatcaatgtcgccggttgacgtactggctcttcttcaatggcggccatcacgcgactagagatatcgaaatggagcacctcgggagtatcaccccgcatactgtcacggattaagtgatagctttcccaggttttctgcatttctgggttatgagccagttcgttaagcagctcactatccagcgtttcgccatccattaaagcggaaagttgttctttctgcatgcctaatacccttatccagtatcccgctatcgtcaacgcctgataagcggttgaactttgttatcaatagcttccctcgctcggaagatacgactacgcaccgtacctaccggacaatccatgatagcggctatctcttcatagctcaggccatccagctcccgcaaggttattgccatgcgtaaatcttccgggagggactcaatagttcggaaaactatctgtctcagttcttcactcaacattaagttctcagggttgctaatttctttcaacgcgccgccactttcgaagttttcagcttcaatggcatccacatcactggaaggtggacgacgcccctgagcaaccaggtaatttttcgctgtatttacagcaatccgatacagccatgtataaaaagcgctatctccccggaagctatccagcgcacgataggctttaataaaagcttcttgtaccacatcgggaacatcaccgctcggcacatagcgggaaaccagactcgccactttatgctgatagcgcactaccagtaagttaaaggctttctgatctcccttctggacccgttcaaccaggacctggtccgttaactgctcgctcatccgaggtaaagtctccccaaaccaaatttccacgcgctatcgaaacgccactccattagctgcaatttgagcaagcaaagggttagagtgtctcgtttttgtaaagttccgtaacgcatctgtttttgtttgtcatgctgtagacggatcattatctatcattataagtctacagaatctgaacatcgcattatctgtgtagaaatgcccatttaactgcctgaagagtaacccaacggcctttttatttcaccacctaatcctccaccagccagtaacttctctttttctcgccgccctgcgtcagcgtgtttagcaactgtaacaaatattaaaatagcaggtgtttatccgcacaacatgatgctatgctgaccaaaccatgtttagtaaattaaacaaagaaaatgaatactctccctgaacatagttgtgacgtgttgattatcggtagcggcgcagccggacttagtctggcgctacgcctggctgaccagcatcaggtcatcgttctaagtaaaggcccggtaacggaaggtagtacattttatgcccagggcggtattgccgccgtgtttgatgaaactgacagcattgacagccatgtggaagacacattgattgccggggctggtatttgcgatcgccatgcagttgaatttgtcgccagcaatgcacgatcctgtgtgcaatggctaatcgaccagggggtgttgtttgatacccacattcaaccgaatggcgaagaaagttaccatctgacccgtgaaggtggacatagtcaccgtcgtattcttcatgccgccgacgccaccggtagagaagtagaaaccacgctggtgagcaaggcgctgaaccatccgaatattcgcgtgctggagcgcagcaacgcggttgatctgattgtttctgacaaaattggcctgccgggcacgcgacgggttgttggcgcgtgggtatggaaccgtaataaagaaacggtggaaacctgccacgcaaaagcggtggtgctggcaaccggcggtgcgagcaaggtttatcagtacaccaccaatccggatatttcttctggcgatggcattgctatggcgtggcgcgcaggctgccgggttgccaatctcgaatttaatcagttccaccctaccgcgctatatcacccacaggcacgcaatttcctgttaacagaagcactgcgcggcgaaggcgcttatctcaagcgcccggatggtacgcgttttatgcccgattttgatgagcgcggcgaactggccccgcgcgatattgtcgcccgcgccattgaccatgaaatgaaacgcctcggcgcagattgtatgttccttgatatcagccataagcccgccgattttattcgccagcatttcccgatgatttatgaaaagctgctcgggctggggattgatctcacacaagaaccggtaccgattgtgcctgctgcacattatacctgcggtggtgtaatggttgatgatcatgggcgtacggacgtcgagggcttgtatgccattggcgaggtgagttataccggcttacacggcgctaaccgcatggccagcaatagtttgctggagtgtctggtctatggctggagcgcggcggaagatatcaccagacgtatgccttatgcccacgacatcagtacgttaccgccgtgggatgaaagccgcgttgagaaccctgacgaacgggtagtaattcagcataactggcacgagctacgtctgtttatgtgggattacgttggcattgtgcgcacaacgaagcgcctggaacgcgccctgcggcggataaccatgctccaacaagaaatagacgaatattacgcccatttccgcgtcagtaataatttgctggagctgcgtaatctggtacaggttgccgagttgattgttcgctgtgcaatgatgcgtaaagagagtcgggggttgcatttcacgctggattatccggaactgctcacccattccggtccgagcatcctttcccccggcaatcattacataaacagataaaaagcctgggtcagcgccgtatacgcttcggaatagttctggtctggcccacgaatgactaagcgatcgctaaagcattctcccgcctgcggggagaatgccagcagcacccgatgcggcagtcgcgcttcgttttccgccacatccgtccgcaaacgtaaatgccagcccatgcttaatgccagctccgtaaaaccattaccaatctgctctggcagcactacgcagaaaaatccctcttcggtaatgcactccgccgcacaggtcagcaagcttgggtgatcaagcgtagtggtatagcgagcctgttcccgttgaggtgtgctgcactctactccctgctgatagtaaggtgggttactgatgattaaatcgaagcgtactgtctgctgtgtaatccactgctgaatatccgccgtatggacgttaatccgctctgcccacggggactggttgatattttcctgcgcctgcgcggcagcttcactttccagttcaactgcatcaatcatcacgctgtcatcggttcgctgcgccagcattaatgccagcaacccgctacccgcgccgatatcaaggcaacgttttaccccagccaccggtgcccatgcgcccaataaaataccatccgttcccactttcatcgcacagcgatcgtgagcaacaaaaaactgtttaaaagtaaatccattacgacgaagcacggatgtagactgactcatgaaaataaaaccttgcaggaaaaacggcgatagcaccgggtgagaacaatacccgagaagcgatatccatacaaacagatgaagattgcagccgtaacgtctataatcagcgccccacacagaggtagaacatgactgtaacgactttttccgaacttgaactcgacgaaagcctgctggaagccctccaggataaaggtttcactcgcccgaccgccattcaggctgccgccattccgcctgcgctcgatggccgtgatgtactcggttctgcgccgacaggcaccggtaaaacggcggcgtatctgctgccagcgttgcagcacctgctcgatttcccgcgtaagaaatccggtccgccgcgtattttgatcctcaccccaactcgcgagctggcgatgcaggtgtccgatcatgcccgcgaactggcgaaacatacgcatctggatatcgccaccatcaccggcggcgtagcctatatgaaccacgcggaagtgttcagcgaaaatcaggacatcgtggtcgccacgaccggacgtctgctgcaatacataaaagaagagaacttcgattgccgcgcggttgaaacgctgatcctcgacgaagcagaccgtatgctggatatgggcttcgctcaggatatcgaacatattgctggcgaaacgcgctggcgtaaacagaccctgctctttagcgcaacgctggaaggcgatgcgattcaggactttgccgagcgtctgctggaagatccggtggaagtttctgccaatccctccacccgtgagcgcaaaaaaattcatcagtggtattaccgcgccgatgatcttgagcataaaaccgcgttgctggtgcatctgttaaaacagccggaagcgacccgcagtattgtgtttgtgcgtaagcgtgagcgtgtgcatgagctggcaaactggctgcgcgaagcgggcatcaacaactgctatctcgaaggtgagatggtacagggcaagcgtaacgaagcgatcaagcgtttgaccgaaggtcgcgtaaacgtactggtcgcaaccgatgttgccgcgcgcggtatcgacattcctgacgtcagccacgtctttaacttcgatatgccgcgcagtggcgatacttatttgcaccgtatcggacgtaccgcgcgcgccggtcgtaaaggcaccgcaattagcctggtggaagcccatgaccatctgctgctgggtaaagtaggccgctatattgaagagccaattaaagctcgcgttattgatgagttacgcccgaaaacgcgtgcgccaagcgaaaagcagaccggcaagccaagcaagaaagtactggctaaacgtgctgagaagaaaaaagctaaagagaaagagaagccgcgggtgaaaaaacgccatcgcgacaccaaaaatattggtaagcgccgtaaaccaagcggaacgggcgtgccaccgcaaacgacagaagagtaatctcaatgccaggtttaagcctggtattaaaagtgctggcaaacgcaaaactgcctgatgcgctacgcttatcaggcctacgtggctcatgcaatatattgaatttgcacgatcttgtaggccggataaggcgttcacgccgcatccggcatgaataaagcgcactttgtcgacaagttaaatgccgggtttaatcccgacattatttttatccagccacaaaactctcttcaacacactgaataaaagtgtgcatcgccgggctaaccgcttttccagcatgatgtgcgcacatggccgtaatggtctggctctgttcgccaaaaggcaattcaattaattctccgcactccaactcttttgccaccgcaaagcgcggtaggtagctgaccccgatattcgccgcgacacaacgcttgatgctttcgatacttataagctcaatggtgttttccaccgtgatccgccgctgacgcagcgtgctctcaaatatctgccggaagacacattgcggttcgttgataataaagctacaggcgttatgtcttcccggctcagtaaaatcgacatctgcaatttgcggactagccaccagcaccagactttgttcacccaactctcgtcgattcagagcatcatcattccctacacgataaaagacgccaacatcggcctcatcattcagtagcgcatcacggatcacgtaacagttcaggctctgcaagcttaaacgcacttttggggcgcgttgccgaaaacgctgcaacacctgcggcattcggtaagagagcaacgtttcgccgctaacaacgcgtagttccccgtccggatcactctcctttttggcagcctcacgaagcgtatccatcactcgggtaagttcataaatgtgcggcagcaacttttttccttcgcgggtaaggcacatccgtcggccaattttctcaaataactggacactaaactcctgctcaagctgctgaatatgaaaagtcaccgtgctttgtgtacagcacaatttttggctagctcgcaaaaaggaaccctcttccaccacggttttaagcgtaataaaacggcgcagatccataaccccaaacctatcgaaaatatcgaatctagaatataaaaacattcatttttttaaatgttccgtgtcgggtactgtctaccaaaacagaggagataacaagtgacaccgacccttttaagtgctttttggacttacaccctgattaccgctatgacgccaggaccgaacaatattctcgcccttagctctgctacgagccatggatttcgtcaaagtacccgcgtgctggcagggatgagtctgggatttttgattgtgatgttactgtgtgcgggcattagttttagtctggcagtgattgacccggcagcggtacaccttttgagttgggcgggggcggcatatattgtctggctggcgtggaaaatcgccaccagcccaacaaaggaagacggacttcaggcaaaaccaatcagcttttgggccagctttgctttgcagtttgtgaacgtcaaaatcattttgtacggtgttacggcactgagcacgtttgttctgccgcaaacacaggcgttaagctgggtagttggcgtcagcgttttgctggcgatgattgggacgtttggcaatgtgtgctgggcgctggcggggcatctgtttcagcgattgtttcgccagtatggtcgccagttaaatatcgtgcttgccctgttgctggtctattgcgcggtacgcattttctattaacgaaaaaaagcggaagaggtcgccctcttccgcttagtaacttgctacttaagccttacaggctttcagtaaaggtacgagcgataacgtcgcgctgctgttccggagtcagagagttaaagcgaactgcataaccggatacacggatggtcagctgcggatatttttccggatgcttaactgcatcttccagagtttcgcgacgcagaacgttaacgttcaggtgttgaccaccttcaacgcgaacttctggtttcacttctactggaacttcacggtattcaatgtcacccagtttgcttactgcaaccacttcatcttctgcataacctgcttttgcaacgatgcaacgcgcttcgcctttttcgctgtccagcagccagaaagagttcagcagatcgtcgttagcggctttagtaatctggatacctgtaatcatgtgatgcctccccggcaaaattatttgatttgttcagcctgtcgcggccaattggtaaaaccattgttgcttgagtgtatatatactcctcaaacacccttgaatctttgatttaaatcaataaaaaccacacatcaagtatggtcgcaaatggattttattgttttacatcaacttatgcgggtgtgaaattttaccaatttacatttttttgcactcgtttaagtctaaaaaatgagcatgattttgttctgtagaaagaagcagttaagctaggcggattgaagattcgcaggagagcgagatggctaacgaattaacctggcatgacgtgctggctgaagagaagcagcaaccctattttcttaatacccttcagaccgtcgccagcgagcggcagtccggcgtcactatctacccaccacaaaaagatgtctttaacgcgttccgctttacagagttgggtgacgttaaagtggtgattctcggccaggatccttatcacggaccgggacaggcgcatggtctggcattttccgttcgtcccggcattgccattcctccgagtttattgaatatgtataaagagctggaaaatactattccgggcttcacccgccctaatcatggttatcttgaaagctgggcgcgtcagggcgttctgctactcaatactgtgttgacggtacgcgcaggtcaggcgcattcccacgccagcctcggctgggaaaccttcaccgataaagtgatcagcctgattaaccagcatcgcgaaggcgtggtgtttttgttgtggggaagccatgcgcaaaagaaaggggcgattatagataagcaacgccatcatgtactgaaagcaccgcatccgagcccgcttagcgcgcatcgtggattctttggctgcaaccattttgtgctggcaaatcagtggctggaacaacgtggcgagacgccgattgactggatgccagtattaccggcagagagtgagtaaatttgcggggaaatgccggatggcagagttgccacccggctgatttatcaggctttattctgacgccaccattcaccaagcaaaacgccggttgcgacagagatattcagcccggcaacgttgcccgtaccgtcaatcttcacgcgcagatcgttcggatcgcgtgcggcatccggtaacccttcatattcctgacccagcaccagtaccattttcgctggcagactagttttgaacagcggtttaccctgctcgctggaagtggtcactacggtgtaacctgcctgacggaaatcatccagcacgttaacaatgttgtcgccagtaatcggctgaacgtgctctgcgccgccttctgcggtacggatagccgccccgctctccagcagtgccgcatcctgcaccacgacacctttcacgccgaagtgcgcgcagctgcgcatcatgccacccaggttatgcgggttagattcgttttccagtgccagaacgcaatcctgcgcgcctgcctggcttacccactgctgcacggttgtaccgttacgctttttgatcaagaagcaaacgccgccgtgatgttccgtgccactcgcttttgtcaattccgcttcatccaccacatggtacgctttgcggtttgctgccatccagcgcaaagcttctttaaaacgcggcgttacactctggataaaccaggcgcgaacaatcgcttccggacggctctggaaaagtgcctgacatgcattttcgccgtagacgcgggtttcttccgcacgctgacgacgcaacacttccggatcaataaaacttttaccactgatgccaccgtgatcggccttttccggcgtctcatcacccggcgcgcgggaaaccgtgcgccacgggctatcttcccacttgcggtcacggggctgactctgtttgtcatcgcgggcggggcgacggccaccgtcagcacgagattttcctggacgcccgccccctttcccggtacgcgggttgtgggtacgtttatcagaatcatcatcactgcggacatacatcactttgaccttgccgcttttacctttcatttcatcgttcatgcttttctccaccagcgctgcgcgaagcgcgcagattacccgaagtccgcgcggttcgccatgatttcgtaccaaagcctgcgactatcatacctattgaataaaacagattgttgtctggaacaatgtccccgataatatgtaacatattagaaacataccggcgtcgttgccgataagtctccttactcatcccgaggttagttatgaataccgtttgtacccattgtcaggccatcaatcgcattcccgacgatcggatcgaagatgcggcaaaatgcggacgctgcggtcacgacttgtttgacggagaggtgattaatgcgaccggtgaaacactcgacaaattgctgaaggatgatctacctgtggtgatcgacttctgggcaccgtggtgcggcccctgccgtaatttcgcaccaatttttgaagatgtcgcgcaagagcgtagcggtaaagtgcgctttgtgaaagtgaataccgaagctgaacgtgaattgagcagtcgctttggaattcgtagtataccgacgatcatgattttcaaaaacggtcaggttgtcgacatgcttaatggcgcagtaccgaaagcgccgttcgatagctggctgaacgaatctctttaatcttaccggggcgcatcttgtgccccgttttctcctctgcgacaatggcgttttttcgacgctctcttatgaccgaaaacgctgttctccagttacgcgccgagcgtattgcgcgcgcaacacgtccttttcttgcccgcggtaatcgcgttcgtcgctgccaacgctgtcttttgccagagaaattatgtctctgtagcacaattaccccagcacaagcaaaaagtcgcttctgtttgctgatgttcgacaccgagccaatgaagcccagtaataccgggcgtctcattgctgatattttgcctgataccgttgcgtttcaatggagccgtaccgaacccagccaggatttgctggagttggtgcaaaacccggactatcagccaatggtggtctttcccgctagctatgctgatgagcaacgggaagtgatcttcacaccacctgccggtaagccaccgctgtttatcatgctcgatggtacctggccggaagctcgcaagatgtttcgtaaaagtccgtatctggataatcttcccgtcatttccgtcgatctttcccggctttctgcctatcgcctgcgtgaagcccaggctgaaggccaatattgtactgccgaggtagccatcgcactgttagatatggccggcgataccggggcggcggcagggttaggcgagcattttacccgctttaaaacacgctatctggcaggaaaaacgcaacatctgggtagcatcacagcagaacagttagaaagcgtttaaaatcattcggtcacttctgcgggagaccggtatgagtcagcgaggactggaagcactactgcgaccaaaaagcatagcggtaattggcgcgagcatgaaacccaatcgcgcaggttacctgatgatgcgtaacctgctggcgggaggctttaacggaccggtactcccggtgacgccagcctggaaagcggtgttgggtgtgttggcctggccggatattgccagcttgccctttacacccgaccttgcggttttatgtaccaatgccagccgtaatcttgctcttctggaagagctcggcgagaaaggctgtaaaacctgcattattctttccgccccggcaagccaacacgaagatctccgcgcctgcgccctgcgccataacatgcgcctgcttggaccaaacagtctgggtttactggctccctggcaaggtctgaatgccagctttagccctgtgccgattaaacgcggcaagctggcgtttattagccaaagcgctgccgtctccaacaccatcctcgactgggcgcaacagcgtaagatgggcttttcctactttattgcgctcggcgacagcctggatatcgacgttgatgaattgcttgactatctggcacgcgacagtaaaaccagcgccatcctgctctatctcgaacagttaagcgacgcgcgacgctttgttagcgcggcccgtagtgccagccgtaataaaccgattctggtgattaaaagcggacgtagcccggcggcacagcgactgctcaacacgacggcaggaatggacccggcatgggatgcggctattcagcgtgccggtttgttgcgggtacaggacacccacgagctgtttagcgcggtggaaacccttagccatatgcgcccgctacgtggcgaccggctgatgattatcagcaacggtgctgcgcctgccgcgctggcgctggatgccttatggagtcgcaatggcaagctggcaacgctaagcgaagaaacctgccagaaactgcgcgatgcactgccagaacatgtggcaatatctaacccgctcgatctacgcgatgacgccagcagtgagcactatattaaaacgctggatattctgctccacagccaggattttgacgcgctgatggttattcatagccccagcgccgctgctcccgcaacagaaagcgcgcaagtattaattgaagcggtaaagcatcatccccgcagcaaatatgtctctttgctgacgaactggtgcggcgagcactccagccaagaggcacgacgtttattcagcgaagccgggctgccgacctaccgtaccccggaaggaaccatcactgcttttatgcatatggtggagtaccggcgtaatcagaagcaactacgcgaaacgccggcgttgcccagcaatctgacttccaataccgcagaagcgcatcttctgttgcaacaggcgattgccgaaggggctacgagcctcgatacccatgaagttcagcccatcctgcaagcgtatggcatgaacacgctccctacctggattgccagcgatagcaccgaagcggtgcatattgccgaacagattggttatccggtggcgctgaaattgcgtagcccggatattccacataaaagcgaagttcagggcgtcatgctttacctgcgtacagccaatgaagtccagcaagcggcgaacgctattttcgatcgcgtaaaaatggcctggccacaggcgcgggtccacggcctgttggtgcaaagtatggctaaccgtgctggcgctcaggagttgcgggttgtggttgagcacgatccggttttcgggccgttgatcatgctgggtgaaggcggtgtggagtggcgtcctgaagatcaagccgtcgtcgcactgccgccgctgaacatgaacctggcccgctatctggttattcaggggatcaaaagtaaaaagattcgtgcgcgcagtgcgctacgcccattggatgttgcaggcttgagccagcttctggtgcaggtttccaacttgattgtcgattgcccggaaattcagcgtctggatattcatcctttgctggcttctggcagtgaatttaccgcgctggatgtcacgctggatatcagcccgtttgaaggcgataacgagagtcggctggcagtgcgcccttatccgcatcagctggaagaatgggtagaattgaaaaacggtgaacgctgcttgttccgcccgattttgccagaagatgagccacaacttcagcaattcattagccgagtcaccaaagaagatctttattaccgctactttagcgagatcaacgaatttacccatgaagatttagccaacatgacacagatcgactacgatcgggaaatggcgtttgtagcggtacgacgtattgatcaaacggaagagatcctcggcgtcacgcgtgcgatttccgatcctgataacatcgatgccgaatttgctgtactggttcgcagcgatctcaaagggttaggcttaggtcgacgcttaatggaaaagttgattacctatacgcgagatcacggactacaacgtctgaatggtattacgatgccaaacaatcgtggcatggtggcgctagcccgcaagctcgggtttaacgttgatatccagctcgaagaggggatcgttgggcttacgctaaatcttgcccagcgcgaggaaagttgagtaaggtactggaaatgttgaccacttaatcgggactggtgttattattgcccgcttatgtcgtctgcattgcacagaggacccttcaatgaacagagaagaaatgcactgtgatgttgagtaaatttaagcgtaataaacatcaacaacaccttgcccaactacccaagatttctcaaagtgttgatgatgtcgatttcttttacgctcccgccgacttccgggagacgctgctggaaaaaatagccagcgcgaagcagcgcatttgcattgtcgccctgtatctcgaacaggatgacggtggcaaaggcattctgaacgcgttgtatgaggctaaaaggcagcgtccggaactggatgtgcgggtgctggtcgactggcatcgtgcacaacgtggacgcattggcgctgcggcatctaacactaacgctgactggtactgccgcatggcgcaggaaaatccgggcgtagatgttccggtttatggcgttccaatcaatactcgtgaagcccttggtgttctgcactttaaaggctttatcatcgacgatagcgtactttatagcggtgccagcctgaacgatgtttacctgcatcagcacgataaatatcgctacgaccgttatcatctgatccgtaaccgtaagatgagtgacattatgtttgaatgggttacacagaatattatgaatggccgcggcgttaatcgtctggatgatgttaatcggccaaaaagcccggaaatcaagaacgatattcgtctgttccgccaggagctgcgtgatgccgcttatcatttccagggcgatgccgacaacgatcagctttctgtaacgccgctagtggggctggggaaaagcagtctgttgaacaagaccattttccatcttatgccttgtgccgagcagaaactaaccatctgtacgccatacttcaacctgccagcaatccttgtgcgcaatattatccagttgctgcgcgaagggaaaaaggtcgaaattattgttggtgataaaaccgcgaatgacttctacattccggaagatgaacctttcaagataattggcgcattgccttatctctatgagatcaatctgcgtcgtttcctgagccgtttgcagtattacgtcaatactgaccagctagtggttcggttatggaaagatgacgacaacacctatcacctgaaagggatgtgggttgatgataagtggatgttgatcaccggtaataacctgaacccgcgcgcctggcgtctggatctggaaaacgccattttgatccacgatccgcaacttgagctggcgccacagcgagagaaagaactggagctgatccgcgagcataccaccatcgttaagcactatcgcgatctgcaaagtattgccgattatccggtgaaggttcgtaaactcatccgccgtttgcgccgtatccgcatcgaccgattaattagccgcatcctgtaatcacaaccccgtcctgtacggggtttgttttttggaggccacgttttgcgtattctttttgtctgttcgctattgttactttctggatgcagccatatggctaacgatagctggagcgggcaggataaagctcaacactttatcgccagcgcgatgctttccgccgccggaaatgaatatagtcagcatcaggggatgagccgggatcgcagtgccatgtttggattgatgttctctgtcagtttgggggcgagtaaagagctttgggatagccgccccgaagggagcggctggagctggaaggatttggcctgggatgtcgccggtgcaagcaccggctataccgtctggcaactgacccgtcattaaagacgcatccccttccctttgcgatgtagcatcaaagaaaccagaaacgccaccacggccatcaaggtcacataccagaagaaggctgtttccattcctatacttttcaggctcaacgctacgtactccgcgctaccaccaaatatagcattagcgaccgcataactcagaccaacgcctaatgcgcgaacctgtgccgggaacatctcagccttcagtattccactgatacttgtataaaaactcactatcagcagggcacacatcaccagaccaaaagcggcataagggctggaaacgttttgcaatgcactgagaataggaacggtaaaaatggctgccaggctaccgaaacataacatactggtacggcgaccaatcttatcgctcagcgcgccaatgagtggttgaataagcatgaatacaaacaatgcggcagtcataatgccactcgccacgttggcatgcattcccgcagtatttaccagatacttctgcatataagtagtgaaggtatagaaacaaagggagcccgcagcggtaaaaccgagaaccatgatgaatgcacggcgattgcgccataatcctttcagagatccagcttcttttaaagcgcgcgtttcttgttggctagtttcatctaactgacgacgtaaccacaacgccacaacagctaacacagctcctaacgcgaaaggaatacgccatccccactctctgagtgcagcgtcttccatggtgtgttgtaaaaccacgacaaccagtagggctagcagttgtccgccgatcaacgtcacatactgaaaacttgcgtaaaaacctttgcgcccttcaacggcaacttcactcatataggtggcgctggtgccatattctccgccaacagataatccctgaaataaacgagcgagaagcaataatgccggagcccacgtacctatagtttcataacctgggaggcaggcgataaccaggcttccgaaacacatcatacacacgcttaacagcatgctttttttgcgaccatgtttatcggctatgcggccaaatagccaaccgcctattgggcgcatcaggaatcccgcagcaaaaacacctgctgtttgtagtagttgagtcgtcgtgttcccggaagggaagaagatgtgggcaaagtagagactacagaagctgtagacatagaaatcgaaccactcgaccagattaccactagaggcccccacaatcgcccaaatgcggcgacgagtatcactacttgtcagtttgctgtctgccgttacagtactttcagccatgccattatgtctcctgccgtaatccgatgcttttgtcggtcgcttttgtttattttttttgtaaaggaaatattatacatttgttgcatatcattatgcaaccttaaccatgaatttagttagcaggaaaatggttattgaggagcttaaggataaatttctggtaaggaggacacgtatggaagtgggcaagttggggaagccgtatccgttgctgaatctggcatatgtgggagtataagacgcgcagcgtcgcatcaggcatttttttctgcgccaatgcaaaaaggccatccgtcaggatggcctttcgcataatttgatgcctggcagttccctactctcgcatggggagaccccacactaccatcggcgctacggcgtttcacttctgagttcggcatggggtcaggtgggaccaccgcgctacggccgccaggcaaattctgttttatcagaccgcttctgcgttctgatttaatctgtatcaggctgaaaatcttctctcatccgccaaaacagcttcggcgttgtaaggttaagcctcacggttcattagtaccggttagctcaacgcatcgctgcgcttacacacccggcctatcaacgtcgtcgtcttcaacgttccttcaggacccttaaagggtcagggagaactcatctcggggcaagtttcgtgcttagatgctttcagcacttatctcttccgcatttagctaccgggcagtgccattggcatgacaacccgaacaccagtgatgcgtccactccggtcctctcgtactaggagcagcccccctcagttctccagcgcccacggcagatagggaccgaactgtctcacgacgttctaaacccagctcgcgtaccactttaaatggcgaacagccatacccttgggacctacttcagccccaggatgtgatgagccgacatcgaggtgccaaacaccgccgtcgatatgaactcttgggcggtatcagcctgttatccccggagtaccttttatccgttgagcgatggcccttccattcagaaccaccggatcactatgacctgctttcgcacctgctcgcgccgtcacgctcgcagtcaagctggcttatgccattgcactaacctcctgatgtccgaccaggattagccaaccttcgtgctcctccgttactctttaggaggagaccgccccagtcaaactacccaccagacactgtccgcaacccggattacgggtcaacgttagaacatcaaacattaaagggtggtatttcaaggtcggctccatgcagactggcgtccacacttcaaagcctcccacctatcctacacatcaaggctcaatgttcagtgtcaagctatagtaaaggttcacggggtctttccgtcttgccgcgggtacactgcatcttcacagcgagttcaatttcactgagtctcgggtggagacagcctggccatcattacgccattcgtgcaggtcggaacttacccgacaaggaatttcgctaccttaggaccgttatagttacggccgccgtttaccggggcttcgatcaagagcttcgcttgcgctaaccccatcaattaaccttccggcaccgggcaggcgtcacaccgtatacgtccactttcgtgtttgcacagtgctgtgtttttaataaacagttgcagccagctggtatcttcgactgatttcagctccatccgcgagggacctcacctacatatcagcgtgccttctcccgaagttacggcaccattttgcctagttccttcacccgagttctctcaagcgccttggtattctctacctgaccacctgtgtcggtttggggtacgatttgatgttacctgatgcttagaggcttttcctggaagcagggcatttgttgcttcagcaccgtagtgcctcgtcatcacgcctcagccttgattttccggatttgcctggaaaaccagcctacacgcttaaaccgggacaaccgtcgcccggccaacatagccttctccgtccccccttcgcagtaacaccaagtacaggaatattaacctgtttcccatcgactacgcctttcggcctcgccttaggggtcgactcaccctgccccgattaacgttggacaggaacccttggtcttccggcgagcgggcttttcacccgctttatcgttacttatgtcagcattcgcacttctgatacctccagcatgcctcacagcacaccttcgcaggcttacagaacgctcccctacccaacaacgcataagcgtcgctgccgcagcttcggtgcatggtttagccccgttacatcttccgcgcaggccgactcgaccagtgagctattacgctttctttaaatgatggctgcttctaagccaacatcctggctgtctgggccttcccacatcgtttcccacttaaccatgactttgggaccttagctggcggtctgggttgtttccctcttcacgacggacgttagcacccgccgtgtgtctcccgtgataacattctccggtattcgcagtttgcatcgggttggtaagtcgggatgacccccttgccgaaacagtgctctacccccggagatgaattcacgaggcgctacctaaatagctttcggggagaaccagctatctcccggtttgattggcctttcacccccagccacaagtcatccgctaatttttcaacattagtcggttcggtcctccagttagtgttacccaaccttcaacctgcccatggctagatcaccgggtttcgggtctataccctgcaacttaacgcccagttaagactcggtttcccttcggctcccctattcggttaaccttgctacagaatataagtcgctgacccattatacaaaaggtacgcagtcacacgcctaagcgtgctcccactgcttgtacgtacacggtttcaggttctttttcactcccctcgccggggttcttttcgcctttccctcacggtactggttcactatcggtcagtcaggagtatttagccttggaggatggtccccccatattcagacaggataccacgtgtcccgccctactcatcgagctcacagcatgtgcatttttgtgtacggggctgtcaccctgtatcgcgcgcctttccagacgcttccactaacacacacactgattcaggctctgggctgctccccgttcgctcgccgctactgggggaatctcggttgatttcttttcctcggggtacttagatgtttcagttcccccggttcgcctcattaacctatggattcagttaatgatagtgtgtcgaaacacactgggtttccccattcggaaatcgccggttataacggttcatatcaccttaccgacgcttatcgcagattagcacgtccttcatcgcctctgactgccagggcatccaccgtgtacgcttagtcgcttaacctcacaacccgaagatgtttcacttcagagttgcgaaaatttgagagactcacgaacaactttcattgttcagtgtttcaattttcagcttgatccagatttttaaagagcaaatatatcaaacaagacttaacagtctgttttgagatattgaggtcggcgactttcactcacaaaccagcaagtggcgtcccctaggggattcgaacccctgttaccgccgtgaaagggcggtgtcctgggcctctagacgaaggggacacgaaaattgcttatcacgcgttgcgtgatattttcgtgtagggtgagctttcattaatagaaagcgaacggccttattctcttcagcctcactcccaacgcgtaaacgccttgctattcacttttcatcagacaatctgtgtgagcactgcaaagtacgcttctttaaggtaaggaggtgatccaaccgcaggttcccctacggttaccttgttacgacttcaccccagtcatgaatcacaaagtggtaagcgccctcccgaaggttaagctacctacttcttttgcaacccactcccatggtgtgacgggcggtgtgtacaaggcccgggaacgtattcaccgtggcattctgatccacgattactagcgattccgacttcatggagtcgagttgcagactccaatccggactacgacgcactttatgaggtccgcttgctctcgcgaggtcgcttctctttgtatgcgccattgtagcacgtgtgtagccctggtcgtaagggccatgatgacttgacgtcatccccaccttcctccagtttatcactggcagtctcctttgagttcccggccggaccgctggcaacaaaggataagggttgcgctcgttgcgggacttaacccaacatttcacaacacgagctgacgacagccatgcagcacctgtctcacggttcccgaaggcacattctcatctctgaaaacttccgtggatgtcaagaccaggtaaggttcttcgcgttgcatcgaattaaaccacatgctccaccgcttgtgcgggcccccgtcaattcatttgagttttaaccttgcggccgtactccccaggcggtcgacttaacgcgttagctccggaagccacgcctcaagggcacaacctccaagtcgacatcgtttacggcgtggactaccagggtatctaatcctgtttgctccccacgctttcgcacctgagcgtcagtcttcgtccagggggccgccttcgccaccggtattcctccagatctctacgcatttcaccgctacacctggaattctacccccctctacgagactcaagcttgccagtatcagatgcagttcccaggttgagcccggggatttcacatctgacttaacaaaccgcctgcgtgcgctttacgcccagtaattccgattaacgcttgcaccctccgtattaccgcggctgctggcacggagttagccggtgcttcttctgcgggtaacgtcaatgagcaaaggtattaactttactcccttcctccccgctgaaagtactttacaacccgaaggccttcttcatacacgcggcatggctgcatcaggcttgcgcccattgtgcaatattccccactgctgcctcccgtaggagtctggaccgtgtctcagttccagtgtggctggtcatcctctcagaccagctagggatcgtcgccttggtgagccgttaccccaccaacaagctaatcccatctgggcacatccgatggcaagaggcccgaaggtccccctctttggtcttgcgacattatgcggtattagctaccgtttccagtagttatccccctccatcaggcagcttcccagacattactcacccgtccgccactcgtcagcgaagcagcaagctgcttcctgttaccgttcgacttgcatgtgttaggcctgccgccagcgttcaatctgagccatgatcaaactcttcaatttaaaagtttgatgctcaaagaattaaacttcgtaatgaattacgtgttcactcttgagacttggtattcatttttcgtcttgcgacgttaagaatccgtatcttcgagtgcccacacagattgtctgataaattgttaaagagcagtgccgcttcgctttttctcagcggcgcggggtgtgcataatacgccttcccgctacagagtcaagcatttctttgcttttctctgttgagattctcaggagaaccccgccgacccggcggcgtgtttgccgttgttccgtgtcagtggtggcgcattatagggagttattccggcctgacaagcgaaaaatataaaaactttatcgttcgctcacttttcaggcaaaacatcttaaatatagtcttttccgtctaacttatagacaaaaacgagccccgaagggctcgttttatcatttactggacggcgacaatccggtcttcattaacttccaggcgaatcactttacccggaaccaattcaccagacagtatttgctgtgccagcgggttttcgatctgctgctgaattgcacgtttcagaggacgtgcaccatagaccggatcgtaaccgttctcgctcagcagtttcagcgcctcgtcagaaatgtggatttcataaccacgttcttccagacgtttgtacagacgtttcaactgaatctgcgcaatgctggcaatgtgctgttcacccagcggatggaagaccaccacttcatcgatacggttaatgaattccggacggaagttatggcttaccacaccgagcaccagctctttcatgtgcgcataatccagttcaccgaagcgttcctgaatcagatcggaaccgaggttagaggtcataatgacgaccgtattacggaagtcgaccgttctcccttgcccgtcagtcagacgcccatcatccagtacctgcaacagaatgttgaagacatccggatgcgctttttccacttcatccagcaggatgacggaatacggacgacgacgcaccgcttcggtcaggtagccaccttcttcataaccgacatatcccggaggcgcaccaaccaaacgagacacgctgtgtttctccataaactcggacatatcgatacggaccatcgcctcgtcgctatcaaacataaagttcgccagcgccttacaaagctctgttttccccacaccagttgggccgaggaacaggaaactaccaatcgggcgatttggatccgccagccccgcacggctacgacgaatagcgttagataccgcatcaaccgcttcgttctgaccaattacgcgatggtgcagttcttgctccatacgcagcagtttttcgcgctcgctttccatcatgcgagaaaccggaatccccgtccaacgcgccagcacttcagcaatttcggcgtcggtcactttattacgcaacagacgcatagttttgccttcgagctgcgttgcggcttccagttgcttttccagttccgggattttgccgtattgcagttcagacatccgcgccaggtcccccacacggcgagcctgttcaatagcgattttcgcctgttccagttccgctttaatggtctgcgtaccagaaaggcttgccttctctgctttccactcttcttctaactcggagtactgacgttctttgtcgctcagttcttcgttgagcatatccagacgttttttactggcttcatcagactctttcattaacgcctgttgttccagtttgagctggatgatacgacgatcgagtcggtcgagttcttctggtttactgtcaatctgcatacgaatgctggatgctgcttcatcgatcaggtcgatggctttatccggcagctgacggtcagcaatgtagcgatgagacaacgtcgccgctgcaacaattgccgggtcagtaatttgcacatggtggtgcaattcgtaacgttctttcaggccacgcagaatcgcaatggtatcttcaacagaaggctcggcaacaaacactttctggaaacgacgttccagcgcagcatctttttcaatgtactggcgatattcgtcaagcgtcgtggcacctacgcagtgcaattcaccacgcgccagcgccggtttcagcatgtttccggcgtccattgcgccatcggctttacccgcgccgaccatggtatgtaattcgtcgataaataggatgacgttgccttcctgtttggcaagatcgttaagcacgccttttaaacgttcttcaaactcaccgcgatatttcgccccagccaccagcgcgcccatatccagcgccagtacccggcggcctttcaacccttccggcacttcgccgttgataatacgctgcgccagaccttcaacgatggcagttttaccgacgccgggttcaccaatcagtaccgggttatttttagtacgacgttgcagcacctgaatggtacggcgaatttcttcatcacgaccaatcaccggatcgagtttgccctgttcggctcgttcggtaaggtcgatggtatattttttcaaagcctgacgttggtcttcagcaccttgatcgttcacgctttcacctccacgcatttgttcaatcgcttgagtaatgttggcggtggtcgcccctgctgctttcaggatgtcggccagcgtgccgcgagactcaagtgccgccagaacgaacagttcactgctgataaagttatcaccacgtttttgcgccagcttgtcgcaaagattaagaacgcgcaccagatcctgacttggctggacatcaccaccagtaccttcaacctgcggtaaacgatttaatgcctgattgatatctgtgcgcaactggccagcatttatgccagcggatgttaataaaggactaacgctacccccttcctgattcagcagggcgctcattaaatgaagtggttcgataaattggttgtcgtgcccgagtgcaagactttgggcatcggcaagagcaagctggaatttattagtaagacgatccagacgcataactcctcccataacggatcaaagttgctactggagattaaatgaggtcatccctcaattattcaaggttattgaccagattaatgtgaaaagaaaatcacgcgtaccggatcgtcttgattctttaggttatatcagccaaatgaaacttgccatacgaccggtggtcttgtcgcgacgataagagaagaaagtctcattttccgtatatgtacaacggtcgccgccgaaaatttgctcaacacccacgttcgccagacgctgccgggcaagctgataaatatccgccagatacttatcaccatgctgaatgaaagctgcacttgctttagcgtctactgccataaacgcctcgcgaacctccccccccacttcgaacgcgcgtggaccaattgccggccctaaccaggcgagaatattttccggattatcagcaaaacaggaaaccgtctcttccagcacgcctgcgcacagtccacgccagccagcatgagcggcggcgacttccgttcccgctcgattgcaaaacagcacagggaggcagtcggcagtcatcactgcgcaaaccgtgccgggcgtattgctataagaggcatccgcccgtttactggcataaggttcgccagtgagcttaagcacatctttgccgtgtacctgctcaagccagaccggtttagaaggcaaattgcccgcagcaaaaagtcgcttgcgattctcctcaacgtgatccgggttatcgccacaatgggcaccgaggttgagactgtcatacgggggcaagctcacgccgccgatacgagtggagctacaggccgcaacaccttttggctgcggccactgcgggacaatcagcttactcataaccagtccacttcatccttatgttcttcgaaatcggcgcgcatcacctcaatcagctccaccatatcttgtggaataggcgcatgccattccatttcgatgccggagatcgggtgataaagacgcagcatggttgcatgtagcgcctggcggtcaaacttacgcagcgtggagataaatgcttcgctagcaccttttggcggacgcggacggccaccataaaccggatcgcccaccagcggatgagtgatatgggccatatgcacgcggatctggtgcgtacgtccagtttccagacgcaaccgcagacgcgtgtgcacacggaagtgttccatgatgcgatagtgagtcaccgctggtttgcccatcggatgcaccgccatatgggtacgtttggtcgggtggcgactgattggctcgtccaccgtgccacctgcggtcatatgaccaatcgccaccgcttcatactcacgagtaatttcacgccgttgcaaagattcgactaaacgcgtctgagccggaacggtttttgccacaaccatcaggccagtggtgtctttatccagacgatggacgatgcccgcacgcggtacatcggcaatgggtggatagtaatgaagcaacgcattcagtaccgtgccatccgggttacccgcgccaggatgtaccaccaggtcgcgcggtttattaatgataataatgtcttcatcttcatagacgatatccagcgggatatcctgcggttcaaaacgcgcttcttcttcaatctcagcgttgatggcaacctgctcgccacccaatactttttctttcggcttatcacaaactttgccgttaaccagcactcgctggtcgaggatccattcttttattcggctacgactataatccgggaacatttcggccaaagcctgatctaagcgttgaccgagttggttttcggacaccgttgcagtgagctgtactcgttgtgccatatatactgcttcttcgtttatcgttggggttttacggctttgccgtttaatatagtgtgctattgtagctggtcttaaccgggagcaggaacagagaatctcccgtattacattttgaggaaagtcaaaacgtcatgacgcgcatgaaatatctggtggcagccgccacactaagcctgtttttggcgggttgcagcgggagtaaggaagaagtacctgataatccgccaaatgaaatttacgcgactgcacaacaaaagctgcaggacggtaactggagacaggcaataacgcaactggaagcgttagataatcgctatccgtttggtccgtatagccagcaggtgcagctggatctcatctacgcctactataaaaacgccgatttgccgttagcacaggctgccatcgatcgttttattcgccttaacccgacccatccgaatatcgattatgtcatgtacatgcgtggcctgaccaatatggcgctggatgacagtgcgctgcaagggttctttggcgtcgatcgtagcgatcgcgatcctcaacatgcacgagctgcgtttagtgacttttccaaactggtgcgcggctatccgaacagtcagtacaccaccgatgccaccaaacgtctggtattcctgaaagatcgtctggcgaaatatgaatactccgtggccgagtactatacagaacgtggcgcatgggttgccgtcgttaaccgcgtagaaggcatgttgcgcgactacccggatacccaggctacgcgtgatgcgctgccgctgatggaaaatgcataccgtcagatgcagatgaatgcgcaagctgaaaaagtagcgaaaatcatcgccgcaaacagcagcaatacataacagaaacctgaaacacaaaacggcagcccttgagctgccgtttttttattctgtcagttgtgaaactgaagcgatttagtcgctatcgatctcatcaaatatggctcgctttgagatattcctcaagtaaaaaaacatctcttcctgcgatttctcacaaaaaagattcgttgacaaaaagtgacaaaattatgagattttcatcacacattttgacatcaggaacggtatgctgaattcaccaagacgggaagacaagaggtaaaatttatgacaatgaacattaccagcaaacaaatggaaattactccggccatccgccaacatgtcgcagaccgtctcgccaaactggaaaaatggcaaacacatctgattaatccacatatcattctgtccaaagagccacaagggtttgttgctgacgccacaatcaatacacctaacggcgttctggttgccagtggtaaacatgaagatatgtacaccgcaattaacgaattgatcaacaagctggaacggcagctcaataaactgcagcacaaaggcgaagcacgtcgtgccgcaacaagcgtgaaagacgccaacttcgtcgaagaagttgaagaagagtaatcctttatattgagtgtatcgccaacgcgccttcgggcgcgttttttgttgacagcgtgaaaacagtacgggtactgtactaaagtcacttaaggaaacaaacatgaaacacataccgtttttcttcgcattcttttttaccttcccctgaatgggaggcgtttcgtcgtgtgaaacagaatgcgaagacgaacaataaggcctcccaaatcggggggccttttttattgataacaaaaaggcaacactatgacaagcgaaaacccgttactggcgctgcgagagaaaatcagcgcgctggatgaaaaattattagcgttactggcagaacggcgcgaactggccgtcgaggtgggaaaagccaaactgctcagccatcgcccggtacgtgatattgatcgtgaacgcgatttgctggaaagattaattacgctcggtaaagcgcaccatctggacgcccattacattactcgcctgttccagctcatcattgaagattccgtattaactcagcaggctttgctccaacaacatctcaataaaattaatccgcacagtgcacgcatcgcttttctcggccccaaaggttcttattcccatcttgcggcgcgccagtatgctgcccgtcactttgagcaattcattgaaagtggctgcgccaaatttgccgatatttttaatcaggtggaaaccggccaggccgactatgccgtcgtaccgattgaaaataccagctccggtgccataaacgacgtttacgatctgctgcaacataccagcttgagcattgttggcgagatgacgttaactatcgaccattgtttgttggtctccggcactactgatttatccaccatcaatacggtctacagccatccgcagccattccagcaatgcagcaaattccttaatcgttatccgcactggaagattgaatataccgaaagtacgtctgcggcaatggaaaaggttgcacaggcaaaaagtccgcatgttgctgcgttgggaagcgaagctggcggcactttgtacggtttgcaggtactggagcgtattgaagcaaatcagcgacaaaacttcacccgatttgtggtgttggcgcgtaaagccattaacgtgtctgatcaggttccggcgaaaaccacgttgttaatggcgaccgggcaacaagccggtgcgctggttgaagcgttgctggtactgcgcaaccacaatctgattatgacccgtctggaaagtcgcccgattcacggtaatccatgggaagagatgttctatctggatattcaggccaatcttgaaagtgcggaaatgcaaaaagcattgaaagagttaggggaaatcacccgtagtatgaaggtattgggctgttacccaagtgagaacgtagtgcctgttgatccaacctgatgaaaaggtgccggatgatgtgaatcatccggcactggattattactggcgattgtcattcgcctgacgcaataacacgcggctttcactctgaaaacgctgtgcgtaatcgccgaaccagtgctccaccttgcggaaactgtcaataaacgcctgcttatcgccctgctccagcaactcaatcgcctcgccgaaacgcttatagtaacgtttgattaacgccagattacgctcactgctcataatgatgtcggcataaagctgcggatcctgagcaaacagtcgcccgaccatcgccagctcaaggcggtaaatcgggctagagagcgccagaagttgctcaagctgaacattttcttctgccaggtgcagcccgtaagcaaaagtagcaaagtggcgcagtgcctgaataaacgccatattctgatcgtgctcgacggcgctaatacgatgcagccgagcgccccagacctgaatttgctccagaaaccattggtatgcttccggtttacgtccatcacaccagaccacaacttgctttgccaggctaccgctgtccggaccgaacatcgggtgtagccccagcaccggaccatcatgcgccaccagcatggcctgtaatggcccatttttcacacttgccagatcgaccagaatacaatctttcggtaaaggcggtaatttgccaataacttgctcagtaacgtggattggcacactaacaatcaccattccggcatcggcaacaatatcagccgctcgatcccagtcatgttgctccagaatccgcacctgataaccgctgagggtcagcatcttctcgaacaggcgtcccatctgaccgccaccgccgacgataaccaccggacgcagactcggacaaagtgttttaaatcctttgtcgttttcactggagtaagattcacgcatcacccgacgcaaaacatcctcaatcagatctggcggtacacccagagcttccgcctctgcacgacggctggccaacatagatgcctcgcgctccggaacataaataggcagtccaaagcggcttttcacctcgcccacttcagcaaccagttccagacgcttcgctaataaattcagcagcgctttatcgacttcatcaatttgatcgcgtaatgcggtcaattcagcaaccataataaacctcttaagccacgcgagccgtcagctgcccgttcagatcctgatgaatttcacgcagcaaggcatcggtcatttcccagctaatgcaggcatcggttacggatacaccgtatttcatttcactgcgcggttgctcggaagactgattgccctcgtggatattactttcgatcatcagaccaataatactgcgattgccatctttgatttgagcaaccacggattctgccaccgcaggctgacggcgataatctttattggaattaccgtggctgcaatctaccatcagagacgggcgcagtcccgcctgttccatctctttttcacattgcgcaacatccgcagggctatagttcggcgctttaccaccgcgcaggatcacatggccgtccggattcccctgagtttgtagcaacgcaacctgccctgcctggttaatgccaacaaaacggtgcggctgggcggcggcgcgcatagcgttaattgctgttgccagactgccgtcggtgccgtttttaaaaccaaccggcatggaaagcccggaggccatttcacggtgagtttggctttccgttgtacgagcaccaattgcactccagctaaacagatcgcccaggtattgcgggctattcggatctaacgcttccgtcgccagtggcagtcccatattcaccagctcaagcagcaatttacgcgcgatctgcagcccggcttctacatcaaaagagccatccatatggggatcgttaattaaccctttccagccgacagtggtacggggtttttcaaaatagacgcgcattaccagatagaggctatcgctgacctctgcggcaagggctttaaatcgacgagcatattccagagcagtttccggatcatgaatggaacaaggaccacatactaccagcagacgaggatcgcgcccggcgataatatcactaatgcttttacggctgtcagcaatctgggcttcttgttgcaggctcaatggaaaagcggccttcagttgttccggagtcattaaaacctgttcgtcggtaatatgtacgttattcagcgcgtctttttgcatgatggcgatcctgtttatgctcgtttgcgatagttgatcctcagcgaggatgacgtaacgataacacataaagtaaagttttcaatccatatttcgtacatttttatttacacaggcaatttagtcgcgctttcaacccttacctctgtatagataaatttacactccctttgaaaacaatccgctatgctttgaaaaaggagaaagaaatgatgaaaaagtttatcgcccccttgttggctttactggttagcggatgtcagattgatccttatactcacgcgccaaccttgaccagcaccgactggtatgatgtcggtatggaagatgcgataagcggcagcgccataaaagatgacgatgcatttagcgatagtcaggcggatcgcggtctataccttaaaggatatgccgaaggacaaaagaaaacttgccagaccgattttacttatgcccgaggactttccggtaaaagctttcctgccagctgcaacaatgttgaaaatgccagccaactgcatgaagtaggcaaaaaggggctgatgaaaatgccagcacaatacgattaaattaattaaaaccccacaaataaattaaacataagattttactcattgtgttttatttctcacattgatgacggtcgcatgaaaaaatgatattttaatgagcattctgaaaaaatatcgatgcatttcgagcgaagatggtggggatccctgaatgcgtttttctcaccgactgttcttacttctgattctcctgctgacgggagcaccaatactcgctcaggagccttctgacgttgcgaaaaacgtgcgtatgatggtttccggtattgtcagttacacccgctggcctgcgctaagtgggccaccaaagttatgtatctttagttctagtcgttttagtaccgccctacaagagaatgccgcgacatctttgccttatctgcctgtcatcattcacactcaacaagaggcgatgattagtggctgcaatggtttttattttggcaacgagagtccgacattccagatggaattaaccgaacaatatccgagtaaggcgttattattaattgccgaacaaaataccgagtgcattattggtagcgccttttgtctgatcatccacaataatgacgtcagatttgccgtaaacctggatgccttaagccgtagcggtgtaaaggtcaacccggatgtcttaatgctcgcacggaagaaaaatgatggataacgataattctcttaataagcgccccacgtttaaaagagcattacgcaacatcagtatgaccagcatatttatcactatgatgctgatctggttgctgctttccgtgaccagcgtgctgaccctgaaacagtacgcgcaaaaaaacctggcactgacagcagcaacaatgacttacagtctggaagcagctgtcgtttttgccgatggccctgcagcaactgaaacactggcagcgctgggccagcaagggcaatttagtactgcagaagtacgtgataagcagcaaaatattctggcatcctggcattacacccgtaaggatccaggcgatactttcagtaatttcataagccactggctcttccctgcccccatcattcagccgattcgtcacaatggtgaaaccattggcgaagtacgcttaaccgctcgcgacagtagtatcagccattttatctggtttagcctcgccgtactgaccggttgtattctgctggcaagtggcatcgcaattaccctcacccgccatttgcacaatggcctggtagaagcgctgaaaaatatcaccgatgtcgtacatgatgtgcgttccaaccgcaatttttcccgacgagttagcgaagaacgtatcgctgagtttcaccgcttcgctctcgacttcaacagtctgctggatgaaatggaagagtggcagcttcgtttacaggctaaaaatgcgcagcttctacgtaccgcgctacatgacccattaaccgggctggctaaccgcgcagcgtttcgtagcggcatcaacacgttgatgaacaattccgatgcccgaaaaacgagcgcgttactatttcttgatggcgataatttcaaatacatcaatgatacctggggtcatgcgacgggcgatagagtcttgattgaaatcgcaaaacggttagctgaatttggcgggctgcgacataaagcataccgcctgggcggcgatgaattcgctatggtgctctatgatgtacagagcgaatctgaagtgcagcagatatgtagtgcactgacacaaatctttaatctcccgtttgatcttcataatggccatcagaccaccatgacattaagcattggttacgcgatgaccattgagcacgcctctgcggaaaaattacaagagcttgccgatcacaatatgtatcaggccaaacaccagcgtgccgaaaagctggtgagataacaaggatatatcgatatgataaagcacctggtagcacccctggttttcaccagtctaatactgactggctgccagtcccctcagggaaagtttactcctgagcaagtcgccgctatgcaatcttatggatttactgaatccgccggcgactggagcctgggcttaagtgatgccattctgttcgcaaaaaatgactacaaattgctcccggaaagccagcaacagatccaaaccatggcagctaaattggccagcacagggctaacacatgcccgtatggatggacacaccgataactatggtgaagacagttacaacgaaggcttaagtttgaaacgggcgaatgtcgtggccgatgcatgggctatgggtggacaaattccacgcagcaatctcaccacacagggtttaggaaaaaaatatcccatagccagtaacaagaccgcccagggccgcgccgagaaccgccgcgtcgcagtggtgattactaccccttaaaacaccagcaaacagataaaaaagggccagccaattggccagcccttcttaacaggatgtcgcttaagcgaaatcttagttaagacgctctttgatacgagcagccttaccagtacgctcacgcaggtagtacagtttagctttacgaacagcaccacgacgtttgacagaaatgctgtcaactaccggagagtgagtctggaagacacgctcaacgccttcgccgttggaaattttacgaacagtgaatgcagagtgcagaccgcggttacgaatagcgataaccacgccctcgaatgcctgcagacgttttttggaaccttcaacaacccatactttcacttccacggtatcacccggacggaaggaaggtacgtcctgcttcatctgctcttgttcaagttgcttaataatgttgctcataatttaatctcttatcctgggtaaactgatatctcgggggcttacgccatcccatcatgtttatgttgctgttgtgcgtgttccgttttgaactccgccagcaaccttgcttgctcttcagtcagagccaggttttccagaagttcaggtcttctaagccaggtacggcccaggctctgtttcaaacgccagcgacgtatctcggcatggttgccgctcagtaacactggcggaacttccatcccttctaacacctcaggccgcgtatagtgcgggcaatccagcaatccttcagcaaaggaatcttccgttgcgctggcttcatgtcccagtactcccggaataaaccgggaaacggagtcaatcagcgtcattgctggtaactcaccaccactgagaacgtaatcgccgatactccattcttcgtcaatttcggtttggatcacgcgctcatctataccttcgtagcgaccgcacaccagaatcaatttttgattcgttgccagttcgctgacgcccgcttgatcaagcttgcgtccctgtggactcagataaatcacctttgcgccttcacccgccgcggcttttgctgcatgaatggcgtcccgcaagggttgcaccatcattaacatccccggtccgccgccgtaaggacgatcgtccacggtacggtgccggtcatgcgtgaagtcgcgaggactccagctctggatgctcagcaggccatttttaactgcccggccagttaccccgtaatcggtaattgcgcggaacatttcaggaaacaggctaattatgccaatccacatagcgccgtcttttaccgtttatccggtggtttaaaaaccaggatcccaatctacttcgatactacgagtagtgagatcgactttcttgataacctgcccatcgaggaacggtacgagacgttccttgataccaaacgcatctttcaggtttgccttaatgacgagaacgtcattagatccggtttccatcatatcgacgactttaccgagatcgtagccttcagtggttactacctggcagcccatcaggtctttccagtagtagtccccctcttcaagctgaggcagctggctactatccacgacaatttcacaattcgtcagcaggttcgccgcatcacgatcgtcaacgcctttcagcttgatgatcatgtcctgattgtggtgcttccagctttccagctggacttgctgccactgacccgccttctggataaaccagggctgatagtcaaaaatgctttcggcgtcttcggtggaagaaaacactctgagccacccacgaataccgtaagagctacccatttttcccaaaacgatgggatcaacaggtgcttgcgcggtgagttgtttgctcatcatgaccaccgtgacagattaagctgctttgtttacttctttgatcagcgcagcaacgcgatcagaaatagttgcgccctggccaacccagtgagcgatgcgatccagatccaggcgagtgccttcttctttttcgctagcgattgggttgaagaaaccaacgcgctcgatgaagcgaccgttgcgtgcattacggctgtcagcgacaacaacctggtagaacggacgctttttagcgccgtgacgtgctaaacgaatagttaccataacatcctcttgtgtgaataaaacaaccggaccccatcgaggaacggagtccggtgtcatattaaaagcccgaaaattttactcatttttgcgggaattgcaatcaacagttgctaactctgctgtaaaaggccgtcggcggtgcagccagtttggtgccggagtgcgcgcagtcaccggagcgtacacgcagtacgtgaggatgacgagcacatcccggtgccaaaatggcaaacaagccaggccgattagcgaccagggaagcctgggggcatcatacccttcatgcttctcatcatcttcgccattccgcccttcttcattttcttcatcatgcgctgcatgtcgtcgaactgtttcagaagacggttaacgtcctgcacctgcataccgcaaccggcagcaatacggcgtttacggctacctttgatgatttctggcttagcgcgctctttcatcgtcatgctgttgatgatggcttccatacgcaccagcactttatcgtccatctgactcttgacgttatccgggatctgccccatgcccggcagcttgcccatcagactagccatgccgcccatatttttcatctggcgcagctgctcaagaaagtcgttgagatcgaagccgtcaccttttttcagcttgctggctaatttctctgcctgcgcgcggtcaactttgctttcgatatcttcgatcaggctcagtacgtcgcccatgccgagaatacggctcgcgatgcggtccggatggaacggctccagcgcctcagttttctcgccaacaccgaggaacttgatcggtttgccagtgatgtgacgaatagagagcgccgcaccgccgcgggcatcgccgtccactttggtcaacactacgccggtaagcggtaacgcttcattgaatgcttttgccgtattggccgcatcctgaccggtcatggcgtcaaccacaaacagggtttcaaccgggttaatgctcgcatggacttgtttgatctcgtccatcatcgcttcgtcaacgtgcagacgaccagcggtatccaccagcagcacgtcgtagaatttcagtttggcttctttcagcgccgcgttaacgatatctaccggcttctgaccaacatcagaagggaagaaatcaacgcccacctgctctgccagcgtctcaagctgtttgattgccgccgggcgataaacgtcggcagaaaccaccagcactttcttcttgtgcttctcgcgcaggaacttaccgagtttaccaacgctggttgttttaccggcaccttgcaggcccgccatcagtacgaccgcaggcggttgcgcagccaggttcagggtctggttctcttcgcccatcgccgcaaccagttcgttacggactattttgacgaactcctgccccggcgtcaggctcttattaacttcatgaccaaccgctttctcttttacgcgattgataaactcacgcactaccggcagagctacgtccgcctccagcagcgccatgcgcacttcgcgcagcgtatcttttacgttgtcttcagtgaggcgtccacggccactgatattgcgcagcgtgcggctcaaacgatcggttaaattatcaaacattgtctctcgcctggggtggaaacggttggccgcaatcgcgacacatcatcagtattttgccgcagtataacatgaaggcgtctttgttgttatgcaacggttggagcagcgtagtcctgacgctatactgcttctctttcttattgctcaaactgtcgacatcactatgcccgtttttgctctgctcgcgcttgtcgcctactccgtcagtcttgcgctgattgttcccggtctgctgcaaaaaaacggcggctggcggcgcatggctattatttctgcggtcattgcgctggtctgccacgcaatcgctctggaagcccgcatcctgcccgacggtgatagcggacaaaacctcagcctgctgaacgttggtagtttggtcagtttgatgatctgtacggtaatgaccattgtggcttctcgcaatcgtggctggctgctgctacccattgtctatgcctttgcgcttatcaacctggcgctggcaaccttcatgcccaatgaatacatcacccatctggaagctacgcctgggatgctggtgcacattggcttaagcctcttttcctatgccacgctaattatcgccgccctgtacgcgctgcaactggcgtggattgattaccaactgaagaacaagaagctggcgtttaaccaggaaatgccgccattgatgagtatcgagcgtaaaatgttccacatcacgcagattggcgtggtgctgctaacgctcacgctttgcactggcctgttctacatgcacaacttatttagcatggaaaatatcgacaaggctgtgctctctatcgtggcgtggtttgtctatattgtgctgctgtggggacattatcatgaaggatggcgtggacgccgcgtcgtctggtttaacgttgcgggcgcggtaattctgacactggcctacttcggcagccgaattgtccagcagttaatcagctaaacccagaaaaggagtttcccctggaacacatttctactactacgttgatcattattctgatcatcatggtggtcatttcagcctatttttccgggtccgaaaccggaatgatgaccctcaaccgctatcgtctgcgacatatggcgaaacagggtaatcgcagcgccaaacgcgtcgaaaaattgctgcgtaagccagaccgcctgataagcctggtgttaatcggcaataacctggtcaatattcttgcctccgcgctcggcactattgttgggatgcgtttgtacggcgatgcgggcgtggcaattgcgactggtgtgctgacttttgtcgtactggtatttgctgaggtattgccgaaaaccattgccgcgctgtacccggaaaaagtcgcttatccgagtagttttctgctggctccgctgcaaattttgatgatgccgctggtctggttgctgaatgctatcacccgtatgctgatgcgcatgatgggtatcaaaaccgatatcgtggttagcggctctttgagcaaagaagagttgcgcactatcgtgcacgaaagtcgcagtcaaatttcccgtcgcaatcaggatatgctgctgagcgtgctcgatctggaaaaaatgaccgttgatgacatcatggtgccgcgcagtgaaattatcggtattgatatcaacgatgactggaaaagcattctgcgccaactctcccacagtcctcacgggcgcatcgtgctctaccgtgatagcctggacgacgccatcagtatgctgcgagtacgtgaagcctggcggttgatgagcgagaaaaaagagttcaccaaagaaaccatgctgcgcgccgcggacgagatctattttgtgccggaaggtacgccgctcagcacgcagttggtaaagtttcagcgcaacaaaaagaaagtcggcctggtcgtcaacgagtatggagacattcaggggctggtgacggttgaagatattctggaagagattgtcggcgatttcactacgagcatgagcccaacacttgccgaagaggtcacgccgcaaaacgacggtagcgtgattatcgatggcaccgccaacgtgcgggaaatcaacaaagcctttaactggcatctaccggaagatgatgcccgcacggttaatggcgtcattcttgaggcactggaagagatccctgtcgcaggcacccgcgtgcgtattggcgagtacgatatcgatattctcgacgtacaggacaatatgattaagcaggtaaaagtttttcctgtgaaaccgctgcgcgagagtgtggcggagtaacgaaaacggcccggcattcgcatgcagggccgtgaattattacgaaagcagaaattaagcttttgctttcgctacagtaaccatcgccgcacgaatcgtacgaccattcagcgtataacccttctgcataatgcccagtacgttacctggcgcaacgtcatcagattccaccattgcgatggcctgatgcacattcgggtccagtgggacgttagtttcggcgatcacttcaacgccaaacttacgcacaacatccagcatgctcttcagcgtcagctcaatgccttcaaccatcgcagacatatccgggttagctttatcagccacttccagcgcacgatccaggctatcaatcaccggcagcaattcgttgatgaatttctccagcgcgaatttgtgggctttttcaatatccagttcagtacgacgacgcaggttttccatttcggcttttacacgcaaaatgccgtcacgttcacgggtctgggcttcagccagctgagcttcgagattcgcaactttttcatcgcgcggatccacctgctcagcagaagcttctggctcaactgcctcaatctcttcgtgctgatccatgataatttcttccggggcttgcccctcaggcgttttctgttctttactactcatgaatttctccgcgtttttttcgcattcatctcgctaacttcgcttattatggggatcagtttcagggtttcaagggaagcactcacattgtcatcaatcttcgcaacaaggacctcggaaaaatgaataatcatttcaagtgtattggcattgtgggacacccacggcaccccactgcactgacaacacatgaaatgctctaccgctggctgtgcacaaaaggttacgaggtcatcgttgagcaacaaatcgctcacgaactgcaactgaagaatgtgaaaactggcacgctcgcggagattgggcaactagctgatctcgcggtagtcgttggtggcgacggtaatatgctgggcgcggcacgcacactcgcccgttacgatattaaagttattggaatcaaccgtggcaacctgggtttcctgactgaccttgaccccgataacgcccagcaacagttagccgatgtgctggaaggccactacatcagcgagaaacgttttttgctggaagcgcaagtctgtcagcaagattgccagaaacgcatcagcaccgcgataaatgaagtggtgcttcatccaggcaaagtggcgcatatgattgagttcgaagtgtatatcgacgagatctttgcgttttctcagcgatctgatggactaattattagcacgccaacaggctccaccgcctattccctctctgcaggcggtcctattctgaccccctctctggatgcgattaccctggtgcccatgttcccgcatacgttgagtgcacgaccactggtcataaacagcagcagcacgatccgtctgcgttttagccatcgccgtaacgacctggaaatcagttgcgacagccagatagcactgccgattcaggaaggtgaagatgtcctgattcgtcgctgtgattaccatctgaatctgattcatccgaaagattacagttatttcaacacattaagcaccaagctcggctggagtaaaaaattattctaattttacgccagcctctttactgtatataaaaccagtttatactgtacacaataacagtaatggtttttcatacaggaaaacgactatgttggcacaactgaccatcagcaactttgctatcgttcgtgagcttgagattgattttcatagcggcatgaccgtaataactggcgagaccggcgcgggtaaatctattgcaatagatgccctcggtctttgtctcggtggtcgcgctgaagccgacatggtgcgtaccggcgctgctcgcgctgacctgtgcgcccgtttttctctgaaagatacgccagcggctctgcgctggctggaagaaaaccagcttgaagacgggcatgaatgtttgcttcgtcgcgtgatcagcagcgatggtcgctcccgtggtttcatcaacggtacagctgttcctctgagtcaactgcgcgaactgggtcagttgctgattcagatccatggtcagcacgctcatcaattactcaccaaacctgagcaccaaaaattcctgcttgatggctatgccaatgaaacctctctactgcaggaaatgaccgcacgttatcagttgtggcatcaaagctgccgtgacctcgcgcatcatcaacagttaagtcaggaacgcgccgcccgtgcggaactgctgcaataccaattaaaagaacttaacgaatttaatccgcagcccggagagtttgaacaaatcgacgaagagtacaaacgtctggcgaacagcggtcaattgctgaccaccagccagaatgcattggcattaatggccgacggtgaagacgcaaacctgcaaagtcagctttacacggctaaacaactggtgagcgaattgattggcatggacagcaaactgtccggcgtacttgatatgctggaagaagctaccatccagattgctgaagccagcgatgaactgcgccactactgcgatcgtctggatctcgatcccaaccgactatttgaacttgaacagcgcatcagtaaacagattagcctggcacgtaaacatcacgtcagccctgaggcattgccacagtattaccagagcctactggaagaacagcagcaactggacgatcaggccgacagtcaagaaacgcttgcgctggcggtaacgaaacatcatcagcaggcactggaaatcgcgcgcgcattacaccaacaacgccagcaatatgcagaagaacttgcacagctgatcaccgacagtatgcatgcgctcagtatgccgcatgggcagtttacgatcgatgttaaatttgacgagcatcacctgggcgctgacggtgccgatcgtattgagtttcgggtaaccaccaacccaggtcagccaatgcagcctattgccaaagtcgcatccggtggtgaattgtcccgcatcgcactggcaatccaggtcatcacggcgcgtaaaatggaaaccccggcactgatttttgatgaagtggatgtagggattagcggtccaacagcggcagttgtcggcaaactgctgcgtcaactcggcgaaagtactcaggtgatgtgtgttacccacctgccacaagtcgcgggatgtggtcatcaacactattttgtcagcaaagaaaccgatggtgcgatgacagaaacgcatatgcaatccctgaataaaaaagcgcggttacaagagctggcgcgcctgcttggtggcagtgaagtcacacgtaatacactggcgaatgcgaaagaactgcttgcagcgtaaacttttttcctgcttcacggtcagagtaaacagcaaaacgccgtaagaccggaaagcaaaaggttttaaagtgatgaaaggtctattatcatcggcatattacagatgagccacgtactgctcgggcccgaaaaggaatcaaatcactatgcgctgtaaaacgctgactgctgcagcagcagtactattgatgttgaccgcaggctgttccactctggagcgagtggtttaccgtcctgacatcaaccaggggaactatctgaccgctaacgacgtatccaaaatacgtgttggcatgacgcaacaacaagttgcgtacgcattgggtacaccgctgatgtccgatccatttggtacgaatacctggttctatgtcttccgccagcaaccaggtcatgaaggtgtaactcagcaaacgctgacgctgacctttaacagtagcggtgtgttgaccaatattgataacaaacctgcgctgagtggtaactaataataaagttgctctcaaagacgttaaaaaaggtgctcaatgagcaccttttttctgtctgttatttattcgcacttttttctgctcgttgcctgcgaagctctttcggatcggcaatgagagggcgataaatctccacccgatcgccatcatgcacactatcgcttagttttgccggacggctgtaaatgccgactttgtttttagttaaatcgatatcggtacgcaattccagcaagccactggcgcgaatagcttcttcaaccgtcgcgccctcctgcagcgtcactcgctgcaggtactgcttctcaggtagcgcataagccacctcaacggcaattttacctggcactgtaaacctctttcgcacgaaccgtaaaagcctggaccatattagccgccagctctttaaacacgcgaccaaaggcgagttcaatcaacttattggtaaactcaaagtcgagatgaaactcgatacgacacgcctcctggctcagcggcgtaaacttccatccaccaatcaatttcttgaacggcccatccaccagattcataagaatactttggttactggtcaactggttgcgggtagtaaacgttttgctgatcccagccttagagacatctaccgccgcagtcatctgcccaggagtggactccagaatccgacttccggtacaacccggcaaaaactgaggataagactgaacgtcattcactaactgatacatttgctccgcgctgtagggtaccagtgcggtccggctaatctgaggcataacaatttccatcaacaaaaatccaacaaataatatcatttatcctgctgtaaaaaaaacgctatcccggcgctgggtaacatcgggttcatgctaagatagagccttgtcccccgcaggattgatatggggtgttttcgatttcagattaccgatgattcacgacgcttatgacgaagaaaaaagcacataaacctggtagtgcgaccatcgcgcttaacaagcgcgcccgtcacgaatactttatcgaagaagagttcgaagcgggacttgccctgcaaggctgggaagttaaatccctgcgcgcaggaaaagccaatatcagcgacagctacgtccttctgcgtgacggagaggcatttctgtttggcgctaacatcacgccaatggccgtggcctccacgcatgtggtgtgcgatcctacccgtacccgcaagttacttctcaaccagcgcgaactggacagtttgtacggtcgcgtcaatcgagaaggctataccgtagtggcgctctccctgtactggaaaaatgcctggtgcaaagtgaaaatcggcgtcgccaaaggtaagaaacagcacgataaacgtagtgatatcaaagagcgcgaatggcaggtggataaagcacgtatcatgaaaaacgcccaccgttaaacctgcactccaattattgaccagttcctcaccgcgcctccctctccggcggcgcgaatgaacatcttattggctatcacatccgacacaaatgttgccatcccattgcttaatcgaataaaaatcaggctacatgggtgctaaatctttaacgataacgccattgaggctggtcatggcgctcataaatctggtatacttacctttacacattggggctgattctggattcgacgggatttgcgaaacccaaggtgcatgccgaggggcggttggcctcgtaaaaagccgcaaaaaatagtcgcaaacgacgaaaactacgctttagcagcttaataacctgcttagagccctctctccctagcctccgctcttaggacggggatcaagagaggtcaaacccaaaagagatcgcgtggaagccctgcctggggttgaagcgttaaaacttaatcaggctagtttgttagtggcgtgtccgtccgcagctggcaagcgaatgtaaagactgactaagcatgtagtaccgaggatgtaggaatttcggacgcgggttcaactcccgccagctccaccaaaattctccatcggtgattaccagagtcatccgatgaagtcctaagagcccgcacggcgcaagccctgcgggcttttttgtgccctcaatttgtcccgcgaagtccgaagagaactaattaaatccgaaccttttaggcccattgataggcccaacgaaaagctctattgtttacgttgggctaaacgcagggagactccccacctttgaaaacaggatgtagcgatgaaacttaacgacagtaacttattccgccagcaggcgttgattaacggggaatggctggacgccaacaatggtgaagccatcgacgtcaccaatccggcgaacggcgacaagctgggtagcgtgccgaaaatgggcgcggatgaaacccgcgccgctatcgacgccgccaaccgcgccctgcccgcctggcgcgcgctcaccgccaaagaacgcgccaccattctgcgcaactggttcaatttgatgatggagcatcaggacgatttagcgcgcctgatgaccctcgaacagggtaaaccactggccgaagcgaaaggcgaaatcagctacgccgcctcctttattgagtggtttgccgaagaaggcaaacgcatttatggcgacaccattcctggtcatcaggccgataaacgcctgattgttatcaagcagccgattggcgtcaccgcggctatcacgccgtggaacttcccggcggcgatgattacccgcaaagccggtccggcgctggcagcaggctgcaccatggtgctgaagcccgccagtcagacgccgttctctgcgctggcgctggcggagctggcgatccgcgcgggcgttccggctggggtatttaacgtggtcaccggtagcgcgggcgcggtcggtaacgaactgaccagtaacccgctggtgcgcaaactgagctttaccggtagcaccgaaattggccgccagttaatggaacagtgcgcgaaagacatcaagaaagtgagcctggagctgggcggtaacgcgccgtttatcgtctttgacgatgccgacctcgacaaagccgtggaaggcgcgctggccagcaaattccgcaacgccgggcaaacctgcgtctgcgccaaccgcctgtatgtgcaggacggcgtgtatgaccgttttgccgaaaaattgcagcaggcagtgagcaaactgcacatcggcgacgggctggataacggcgtcaccatcgggccgctgatcgatgaaaaagcggtagcaaaagtggaagagcatattgccgatgcgctggagaaaggcgcgcgcgtggtttgcggcggtaaagcgcacgaacgcggcggcaacttcttccagccgaccattctggtggacgttccggccaacgccaaagtgagcaaagaagagacgttcggccccctcgccccgctgttccgctttaaagatgaagctgatgtgattgcgcaagccaatgacaccgagtttggccttgccgcctatttctacgcccgtgatttaagccgcgtcttccgcgtgggcgaagcgctggagtacggcatcgtcggcatcaataccggcattatttccaatgaagtggccccgttcggcggcatcaaagccagcggtctgggtcgtgaaggtagcaagtatggcatcgaagattacttagaaatcaaatatatgtgcatcggtctttaactggagaatgcgaatgaacagcaataaagagttaatgcagcgccgcagtcaggcgattccccgtggcgttgggcaaattcacccgattttcgctgaccgcgcggaaaactgccgggtgtgggacgttgaaggccgtgagtatcttgatttcgcgggcgggattgcggtgctcaataccgggcacctgcatccgaaggtggtggccgcggtggaagcgcagttgaaaaaactgagccacacctgcttccaggtgctggcttacgagccgtatctggagctgtgcgagattatgaatcagaaggtgccgggcgatttcgccaagaaaacgctgctggttacgaccggttccgaagcggtggaaaacgcggtaaaaatcgcccgcgccgccaccaaacgtagcggcaccatcgcttttagcggcgcgtatcacgggcgcacgcattacacgctggcgctgaccggcaaggtgaatccgtactctgcgggcatggggctgatgccgggtcatgtttatcgcgcgctttatccttgcccgctgcacggcataagcgaggatgacgctatcgccagcatccaccggatcttcaaaaatgatgccgcgccggaagatatcgccgccatcgtgattgagccggttcagggcgaaggcggtttctacgccagcagcccagcctttatgcagcgtttacgcgctctgtgtgacgagcacgggatcatgctgattgccgatgaagtgcagagcggcgcggggcgtaccggcacgctgtttgcgatggagcagatgggcgttgcgccggatcttaccacctttgcgaaaagcatcgcgggcggcttcccgctggcgggcgtcaccgggcgcgcggaagtaatggatgccgtcgctccaggcggtctgggcggcacctatgcgggtaacccgattgcctgcgtggctgcgctggaagtgttgaaggtgtttgagcaggaaaatctgctgcaaaaagccaacgatctggggcagaagttgaaagacggattgctggcgatagccgaaaaacacccggagatcggcgacgtacgcgggctgggggcgatgatcgccattgagctgtttgaagacggcgatcacaacaagccggacgccaaactcaccgccgagatcgtggctcgcgcccgcgataaaggcctgattcttctctcctgcggcccgtattacaacgtgctgcgcatccttgtaccgctcaccattgaagacgctcagatccgtcagggtctggagatcatcagccagtgttttgatgaggcgaagcagtaacgccgctcctatgccggaggcgacgctgcgcgtcttgtccggcctacggggatccaggtcggataaggcgtttacgccgcatccgacaatctgtacgtgaacaggaagaaatctatgttggccgggtaaggcggagccgctctccggcaaaaagaatcaataacaattatacgcgtgacccggcgcgggaaatgtcggggcgctctcccaagtgacacactttcgagaggattcaggatggggcaaagtagccaaccacatgagttaggcggcgggctgaagagtcgccacgtcaccatgttgtctattgccggtgttatcggcgcaagtctgtttgtcggttccagcgtcgccatcgccgaagcgggcccggcggtattactggcctatctgttcgccgggctactggtggttatgattatgcggatgttggcggaaatggcggttgccacgcccgataccggtagcttttccacctatgccgataaagccattggtcgctgggcgggctataccatcggctggttgtactggtggttttgggtactggttatcccgctggaagccaacatcgccgccatgatcctgcacagttgggttccaggcattcccatctggttattttccctcgtcattaccctcgccttaactggcagtaacttattaagcgttaaaaactacggcgaatttgagttctggctggcgctgtgcaaagtcatcgctatcctggcctttattttccttggtgcagtcgcaattagcggtttttacccgtatgccgaagtgagcgggatcagtagattgtgggatagcggcggctttatgcccaacggtttcggtgcggtattaagcgcgatgttgatcaccatgttcagctttatgggcgcagaaattgtcaccattgccgccgcggaatccgacacgccggaaaaacatattgtccgcgccaccaacagcgttatctggcgtatttctatcttctatttatgttctatttttgtcgtcgtggcattaattccgtggaatatgcccggactaaaagccgtcggttcttatcgcagcgtactggaattgctcaatattccccatgcgaaattaatcatggactgcgtgatattactttccgtaaccagttgcctgaacagcgcgctgtataccgcgagtaggatgctctactccttaagtcgtcgcggtgatgctcccgcggtaatgggtaaaatcaaccgcagtaaaaccccgtacgtggcggtgttactctccaccggcgcggcattcttaacggtggtggtgaactattacgcgcctgcgaaggtatttaaatttctgatcgacagctccggcgctatcgccctgctggtttatttagtcatcgccgttagtcagttgcggatgcgcaaaattctgcgagcagaaggaagcgaaattcgcttgcgaatgtggctttatccgtggctcacctggctagtcatcggctttattacctttgtgttggtagtgatgctattccgtccggcgcaacagttagaagtgatctccaccggcttattagcgatagggattatctgtaccgtgccaattatggctcgctggaaaaagctggtattgtggcaaaaaacacccgttcataatacgcgctgatcatgatcaggagtcacaccatgaccattacgtctctggatggctatcgctggctgaagaacgatattattcgcggtaattttcaaccggatgaaaaattacgaatgagtttgctgacaagccgttatgcacttggcgttgggccgttacgggaagctcttagccaactggtggcggaacggctggtcacggtggtgaatcaaaaagggtatcgggtggcgtctatgagtgagcaggagctgctcgatattttcgacgcccgcgccaatatggaagcgatgttagtgagtctggcgattgcccgcggtggcgatgagtgggaggcagacgttctcgcaaaagcgcatctgctgagtaagcttgaggcctgtgacgccagcgagaaaatgcttgatgagtgggatctgcgtcatcaggcgtttcatacggcaattgtggcgggctgtggttctcactatttgctgcaaatgcgtgaacggttgtttgatctggcggcgcgttatcgatttatctggctgcggcgaacggtgcttagcgtggaaatgctggaggataaacacgatcagcaccagaccctgactgcggcggtactggcgcgagataccgcgcgcgccagtgagttaatgcgccagcatttactgacgccaattcccattatccagcaggcgatggctggcaattaattactcttccggaatacgcaacacttgccccggataaattttatccgggctttttagcatcggtttattcgcttcgaagattttattgtacagattagcgttaccgtagacctgtttggaaatggcactcagagtgtcgccagacttaacggtataaaactggctggcagtggctggtgtcgccgttttcacctgatcatcgacactggcaataccggaaatattccccaccgcaacaaggattttctccttcgcctcctgactcaggccgtcaccagtgaccgtcgctttgccgtcggcaatttgaatattcactttatcggcatccggtataccggttttgttcagatgctcctgcaccttcttcgcctgatcgtctttatcgtgctgacctgtaaccgcgtcccagagtttttctccggcatctttcacaaaattgaacagacccatagctacctcattcgttaacggaaacactcagaaagtgtagcagaggaacgcggcgcgttaacgccgcggggatgagcacaggtttaatcgcgggtttgcacccagaacgcgtgaatcaaaccggggatatacccaagcagtgtcaacagaatattaataatgaacgcccaaccgaaccctttaccgagcagcacgccgagcggcggcagaatgatggtgatgacgattctccagaaacccatatgtactccctataagaaaattactcattgtttaaaaagagattttatctcttaagcgtagtaattttagcggagcctgccagtttcagcttacgcttttactctcatttacgctgctgaggctggtatatgttgcatttttagtttagagtttacttaatttagaaaatacttaaataaatatgactgaactcgcgcaattacaggccagtgccgaacaggcagcggccttattgaaagcaatgagccaccctaaacgattgctgattctgtgcatgcttagcggttcccccggcaccagcgcgggagagctgacgcgcattaccggactgagtgcctctgcgacaagtcagcatctcgctcgtatgcgggacgaagggcttatcgacagccaacgggatgcccaacgcattctatattccattaaaaatgaggcggtaaatgccattatcgccaccctgaaaaatgtctattgtccgtaaggagtcactatggctttgacaaccattagcccgcatgatgcacaagaattaatcgcacgcggcgcaaagttaatcgatattcgtgatgctgatgaatatcttcgtgaacatattcctgaagcagatctggctccattatccgtgctggaacagagtggtcttccggctaaattacgtcacgagcaaattatattccactgccaggcaggtaaacgcaccagtaataatgccgataaattagcagcgattgccgcccccgcagaaatctttttactcgaagatgggattgatggctggaaaaaagcaggattgccagtagcggtaaataaatctcaacccttgccgttaatgcgccaggtgcagatcgctgcgggtggtttaatattaatcggcgttgtactgggttataccgtaaatagcggtttcttcttattaagtggctttgttggtgccgggttactgtttgcaggaatcagcggtttttgtggaatggcaaggttgttagataagatgccgtggaaccaacgagcttgagaagcgacgccggacgcgccctagcagcgacatccggcctcagtaattagatcaggaaatcgtcgagagatttaccttctgccagcgcctgagcaattggcttcggtgtacggccctgaccggtccaggttttagtttcaccgttaacatcggtgaatttatatttcgccggacgcggctggcgttttttaccagcgcgtggtgcagcagcagagctattacccaataactcttccgggttaattccgtcagctttcatcagctccagccaggtgctaattttttcctggcgctctgccagttcacgctgctgctgttcttcttcttcacgtctttctttagtgacaaccctgaatttttcgagcatttcttcaagaacgtcaatggagaattcgcgagccatcgcacggagggtgcgaatgttatttaaactttgtaacattacggacataataaagaaaaccttttaacgccaaaacaaaaaaagtatttcgtcgcgtagtgtaagcgatcacttattatatttccacaaaatttaatctatttacagtcctgcgcgagattatttcagctgttattttctgaaactctcagaataatttcaagattatatattagccattttgatgagtaatttagattattggtgaacagagcggcgctctctgctcgctaattccgcaagcctgacaaaatcaaagtgaataaaaatgcaatataacagaataaaagaaaacatccatcactggtgctttctgctgttaatgtacattgtctggcataaaaaatgctgaaaatgacccagctactacatacaccgaattctctacgcttatagcgttacctcacccccaaactttcattagtgatattaaaggtaaggccatatctaattgatttaattaaaaataaatcatatcggcatgtaaaaatccacaatgtacaaaaaacgagccgttacggaatattttatctacaaaaactgactaaataaaaatttttcactaattgattagtcatagccagcgatatacgctatgcgaaaatgcagatggcaatgagatccactgctttcatctccattaacatcccattacgcttttattaaggagcattagcatgttcagtccgcagagtcgcttgcgtcatgcagttgcagatacgttcgcgatggttgtttactgttctgtcgtgaacatgtgtattgaagttttcctctccggaatgagcttcgaacagtctttttattccagattggtagcgattccggtgaacatcttaattgcatggccatacggtatgtaccgtgatctgtttatgcgcgcggcacgcaaagttagcccgagcggctggataaaaaatctggcggatatcctggcttatgtgacgttccagagtccggtgtatgtggcgatcttgttagtggtgggcgcagactggcatcagattatggcggcggtcagtagtaacatcgttgttagcatgttgatgggggcggtttatggctacttcctcgattattgccgccgactgtttaaagtcagccgttaccagcaggtaaaagcctgactcttcttttcgcgactggcatcgccagtcgcgtctttaactggcttcgccaaataaaccattcaaataacgttcaagcgcaacacggctactaaagccatgcgggataccgtaatgctcgtgtcgctcgcctgctaaatagagcggaaattgctggtaatgatcgcaagttttaatatcggaagcgggttcagccagtgtgctactgcgttcttttaatgttggatgaattaccagagcggtacgtcccattcgcgcttcgcgattaacatagacataattttccccacggcggtaaccatacgctttctgggttaccacatcgacagtaaaaccgactttttcaagtacgcgcgccacctcgtctggtcgtaaatacatatttgatcctcgttattatcaaccgcgggcctaccttacctgattgcgcattcacaacgctttcagaaaagtccataaagccgcgatgaacctcagttaagaaaattatggtctacactgaaaattacatcgaattctaatgggggatcatatgtttaaccgaccgaaccgcaacgacgttgatgatggcgtgcaggatatccagaatgatgtcaatcaattagctgacagcctcgaatctgtattgaagtcctggggcagcgacgccaaaggggaagctgaagccgcacgcagtaaagctcaggcattgctgaaagaaaccagggcgcgaatgcatggtcgtactcgcgtccagcaagccgcgcgcgatgccgttggctgcgcggattcttttgttcgtgaaagaccctggtgtagcgtgggtacagcagctgcggtaggtatttttatcggcgcactgttaagcatgcgcaaaagctaatgcaaaaatgataataaatacgcgtctttgaccccgaagcctgtcttcggggtttctttttgcctggtgaatcacaaaaatccccctaccccgtcacgctcatatccagggtaatttcgaccactatttgctatatattgtgtggttgaatcttttttcaactacatctagtatctctgtatcaacagagagacaacccgacgcgtatcatcgcgccgtatcttcattttaaacggaaatacgaatcatgcgcattactatttacactcgtaacgattgcgttcagtgccacgccaccaaacgggcgatggaaaaccggggctttgattttgaaatgattaatgtcgatcgcgttcctgaagcggcagaagcgttgcgtgctcagggctttcgtcagttgccggtagtgattgctggcgatcttagctggtctggtttccgtccggacatgattaaccgtctgcatccagcgccacacgcggccagtgcatgagccagctcgtctacttctccagcagctccgaaaacacgcagcgttttatcgaacgtttaggtctgcccgcggtgcgcatcccgctcaatgagcgggaacggattcaggtagacgagccttacatcctgatcgtgccctcttacggcggcggcggtacggctggcgcggtgccacgacaggtaattcgctttttaaacgacgagcacaaccgggcgttgcttcgcggcgttattgcttctggtaatcgcaactttggtgaggcgtatggccgcgccggagatgtgattgcccggaaatgcggcgtgccgtggctgtaccgttttgaactcatgggtacgcaaagcgatatcgaaaacgttcgtaaaggagtaaccgaattttggcaacgacaaccgcagaatgcctgacgcaggaaacgatggattaccacgcgctgaatgcgatgcttaacctctacgatagcgcaggtcgcattcagttcgataaagaccgccaggccgttgacgcctttattgcgacgcatgtgcgtccgaacagtgtgaccttcagtagccagcagcagcgcctgaactggctggtcaacgaaggttactatgatgaaagcgttcttaatcgctactctcgcgactttgtcattacgctgtttacccacgcacacaccagcggttttcgtttccagacattcctcggggcatggaagttttacaccagctatacgttgaagacattcgacggtaaacgttatctggaagattttgccgatcgagtaacgatggtggcgctgacgctggcacaaggcgatgagacgctggcgttgcaactgaccgatgaaatgctgagtggacgctttcagccagccacgccaacattcctcaactgcggtaagcagcagcgcggcgaactggtttcctgttttttgctgcgtattgaagacaatatggagagcattggtcgggcggtaaattccgcactgcagctgagcaaacgcggcggcggcgtagcatttttgctgagcaatctgcgagaagcgggcgcgccaattaaacgtattgaaaatcaatcttctggcgtaattccggtgatgaaaatgctggaagacgcattttcctatgccaaccaactcggcgctcgtcagggggctggtgcagtctatttacatgctcatcatcccgatattctgcgttttctcgacacgaaacgggaaaatgccgacgaaaaaatccgcattaaaacactgagccttggcgtggtgatcccggatatcactttccatctggcaaaagagaatgcgcagatggcgctgtttagcccttatgacgtagagcgagtttatggcaagccgtttgccgatgtggccatcagccaacactatgacgaactggttgccgatgaacgcattcgcaaaaaatacctcaacgcccgtgatttcttccagcgactggcagaaatccagtttgagtccggctatccctacatcatgtatgaagacacggtaaaccgtgctaaccctatcgccgggcgcataaatatgagtaatctctgcagtgaaattttgcaggttaacagcgccagtgagtatgacgagaatctcgactatacccgcacaggccatgatatttcctgcaatttaggtagcttgaatattgcgcacaccatggattcccccgattttgcccgcacggtagagactgccgtgcgcggtttaacggcagtaagtgatatgagtcatatccgcagcgtgccgtccatcgaagccggaaatgccgccagccacgccatcggactggggcagatgaatttacacggctatctggcgcgagaaggcatcgcttatggtagcccggaagcactggatttcaccaatctctatttctatgccatcacctggcatgcactgcgtaccagcatgttgctggcacgcgaacgcggtgaaaccttcgccgggttcaaacagagtcgctatgccagtggtgaatattttagccaatatctgcaagggaactggcagccgaaaacggcgaaagttggcgaactgtttacccgtagcggtattacgttacctacccgtgagatgtgggcgcagctgcgcgacgacgtgatgcgctacggcatatacaaccagaatcttcaggcggtgccgccaaccggttctatctcttatatcaaccatgctacgagcagtattcatccgattgtggcgaaagtagagatacgcaaagagggcaaaacaggacgcgtttactaccctgccccgtttatgactaacgagaatctggcgctgtatcaggacgcttacgaaattggcgcagaaaagatcatcgacacctacgcggaagcgactcgccatgtcgatcaggggctgagcctgacgctttttttccccgataccgccaccactcgcgatatcaacaaagcgcagatttacgcctggcgcaagggtatcaaaacgctctattacatccgcctgcgtcagatggcgctggaaggcactgaaattgaaggctgcgtctcctgtgcactttaaggaatatctatgaaactcagtcgtatcagcgccatcaactggaacaagatatctgacgataaagatctggaggtgtggaatcgcctgaccagcaatttctggctaccagaaaaggtgccgctgagcaacgatattcctgcctggcagacattaactgtcgtagaacaacaactgacgatgcgcgtttttactggcctgacgctgctcgacacgctgcaaaatgttatcggcgcgccttctctgatgcccgatgcactcacgcctcatgaagaagcggtattaagcaatatcagctttatggaagcggttcatgcccgctcttacagtagcattttcagcacgctatgccagaccaaagatgtcgatgccgcctacgcctggagtgaagaaaacgcaccgttgcagcgaaaagctcagattattcagcaacattatcgcggtgatgatccgctgaaaaagaaaatcgccagtgtgtttcttgaatcttttttgttctattccggtttctggctgccgatgtatttttccagccgcggaaagctgaccaataccgcggacctgatccgtctgattatccgcgatgaagcagtccacggttactacataggctataaatatcagaaaaacatggaaaagatatctctgggacaacgtgaagagttgaagagtttcgccttcgatttgttgctggaactctacgacaacgagttgcaatacaccgatgagctgtacgccgaaaccccgtgggctgacgatgtgaaagcgtttctctgttacaacgccaataaggctttgatgaatctgggctacgaaccgttatttcccgcagaaatggcggaagtgaatccggcaatcctcgccgcgcttagcccgaatgccgatgaaaatcacgatttcttttccggtagtggctcctcttatgtgatggggaaagcggttgaaacagaagatgaagactggaatttctgagggtgttattttcaaaaatatcactacccgcagcagggaaataattcccgccaaatagctttttatcacgcaaataatttgtggtgatctacactgatactctgttgcattattcgcctgaaaccacaatattcaggcgttttttcgctatctttgacaaaaaatatcaactttctcgatttgctctcagcccttatatcacgggaaattccggcgatttgctcgcatcaatattcatgccacatttgccatcaggggttgcctcagattctcagtatgttagggtagaaaaaagtgactatttccattgggtaatatatcgacatagacaaataaaggaatctttctattgcatggcaattaaattagaaattaaaaatctttataaaatatttggcgagcatccacagcgagcgttcaaatatatcgaacaaggacttagtaaagaacaaattctggaaaaaactgggctaagccttggcgtaaaagacgccagtctggccattgaagaaggcgagatatttgtcatcatgggattatccggcagcggtaaatccacaatggtacgccttctcaatcgcctgattgaacccacccgcgggcaagtgctgattgatggtgtggatattgccaaaatatccgacgccgaactccgtgaggtgcgcagaaaaaagattgcgatggtcttccagtcctttgccttaatgccgcatatgaccgtgctggacaatactgcgttcggtatggaattggccggaattaatgccgaagaacgccgggaaaaagcccttgatgcactgcgtcaggtcgggctggaaaattatgcccacagctacccggatgaactctctggcgggatgcgtcaacgtgtgggattagcccgcgcgttagcgattaatccggatatattattaatggacgaagccttcagcgcgctcgatccattaattcgcaccgagatgcaggatgagctggtaaaattacaggcgaaacatcagcgcaccattgtctttatttcccacgatcttgatgaagccatgcgtattggcgaccgaattgccattatgcaaaatggtgaagtggtacaggtcggcacaccggatgaaattctcaataatccggcgaatgattatgtccgtaccttcttccgtggcgttgatattagtcaggtattcagtgcgaaagatattgcccgccggacaccgaatggcttaattcgtaaaacccctggcttcggcccacgtagcgcactgaaattattgcaggatgaagatcgcgaatatggctacgttatcgaacgcggtaataagtttgtcggcgcagtctccatcgatagccttaaaaccgcgttaacgcagcagcaaggtcttgatgcggcgctgattgatgcgccgttagcagtcgatgcacaaacgcctcttagcgagttgctctctcatgtcggacaggcaccctgtgcggtgcccgtggtcgacgaggaccaacagtatgtcggcatcattagcaaaggaatgctgctgcgcgctttagatcgtgagggggtaaataatggctgatcaaaataatccgtgggataccacgccagcggcggacagtgccgcgcaatccgcagacgcctggggtacaccgacgactgcaccgactgacggcggtggtgctgactggctgaccagtacgcctgcgccaaacgtcgagcattttaatattctcgatccgttccataaaacgctgatcccgctcgacagttgggtcactgaagggatcgactgggtcgttacccatttccgtcccgtcttccagggcgtgcgcgttccggttgattatatcctcaacggtttccagcaattgctgctgggtatgcccgcaccggtggcgattatcgttttcgctctcatcgcctggcagatttccggggtcggaatgggtgtggcgacgctggttagcctgattgccatcggcgcaatcggtgcctggagccaggcaatggtgactctggcgctggtgttaaccgccctgctgttctgtatcgtcatcggtttgccgttggggatatggctggcgagaagtccgcgagcggcgaaaattattcgtccactgcttgatgccatgcagaccacgccagcgtttgtttatctggtgccaatcgtcatgctatttggtatcggtaacgtgccgggcgtggtggtgacgatcatctttgctctgccgccgattatccgtctgaccattctggggattaaccaggttccggcggatctgattgaagccagccgcagtttcggtgccagcccgcgccagatgctgttcaaagttcagttaccgctggcgatgccgaccattatggcgggcgttaaccagacgctgatgctggccctttctatggtggtcatcgccagcatgattgccgtcggcgggttgggtcagatggtacttcgcggtatcggtcgtctggatatggggcttgccaccgttggcggcgtcgggattgtgatcctcgccattatcctcgatcgtctgacgcaggccgttgggcgcgacagtcgcagtcgcggcaaccgtcgctggtacaccactggccctgttggtctgctgacccgcccattcattaagtaactctgcacttgcccggtgacgccgggcattatcaccctgccaaaaaaaggaataacaatgcgacatagcgtactttttgcgacagcgtttgccacgcttatctctacacaaacttttgctgccgatctgccgggcaaaggcattactgttaatccagttcagagcaccatcactgaagaaaccttccagacgctgctggtcagtcgtgcgctggagaaattaggttataccgtcaacaaacccagcgaagtagattacaacgttggctacaccagccttgcttccggcgatgcaaccttcaccgccgtgaactggacgccactgcatgacaacatgtacgaagctgccggtggcgataagaaattttatcgtgaaggggtatttgttaacggcgcggcacagggttacctgatcgataagaaaaccgccgaccagtacaaaatcaccaacatcgcacaactgaaagatccgaagatcgccaaactgttcgataccaacggcgacggaaaagcggatttaaccggttgtaaccctggctggggctgcgaaggtgcgatcaaccaccagcttgccgcgtatgaactgaccaacaccgtgacgcataatcaggggaactacgcagcgatgatggccgacaccatcagtcgctacaaagagggcaaaccggtgttttattacacctggacgccgtactgggtgagtaacgaactgaagccgggcaaagatgtcgtctggttgcaggtgccgttctccgcactgccgggcgataaaaacgccgataccaaactgccgaatggtgcgaattatggcttcccggtcagcaccatgcatatcgttgccaacaaagcctgggccgagaaaaacccggcagcagcgaaactgtttgccattatgcagttgccagtggcagatattaacgcccagaacgccattatgcatgacggcaaagccagtgaaggcgatattcagggacacgttgatggttggatcaaagcccaccagcagcagttcgatggctgggtgaatgaggcgctggcagcgcagaagtaatttttattcgggcggataaggcgtttttgccgcatccgccgttctgtgcacaatgcctgatgcgacgctggcgcgtcttatcatgcctacaaaccacatcgcacatttcaacaatctatctttcatcccatattcatcaacatccgctattattgatttccagcttaatcatcacctgatgaacaaaaataatgactaaacctaatcatgagcttagcccggcgctgatcgtgctgatgtctatcgccaccggtctggcggtagccagtaactattacgcccagccattgctcgacaccatcgcgcgtaacttttccctttccgccagtagcgcaggctttattgttaccgccgcgcagttgggctatgccgcaggtctactgtttcttgttcccctcggtgatatgtttgaacgccgccgcctgattgtcagcatgaccttactggcggcatgttgattaccgccagcagtcagtcgctggcgatgatgatcctcggtacggcattaaccggtttattcagtgtcgtggcacaaattctggttccgctggcagcgacgctggctagtccggataaacgcggcaaagtggttggcactattatgagcggtctgctgttggggatcttgctggcacggacagttgccggattgctggcgaatctcggcggctggcgcaccgtcttttgggttgctagcgtgttaatggcactgatggcgctggcattatggcgtggtctgccacaaatgaaaagtgaaacccacctcaactacccacagttgttgggttccgttttcagtatgtttatcagcgataaaattctgcgtacccgcgcgttgctgggctgcctgacctttgccaatttcagcattctctggaccagtatggcctttttgcttgccgctccaccttttaactacagcgatggtgtcattggtctgtttggacttgcgggagctgccggagcgttgggcgctcgtccggcgggcggttttgccgataagggcaaaagccaccacaccacaactttcggtctgctgctgctattacttagttggctggcgatctggtttggtcacacttccgtactggcgttgattatcggaatcctggtgctggatctcaccgtgcagggcgtgcatatcactaaccagacggtaatttatcggatacatcctgatgcgcgcaatcgcctgaccgcaggttacatgactagctactttattggcggtgccgccggtagcctaattagtgccagtgcctggcaacatggcggttgggctggcgtttgtctggctggcgcgacgattgccctggttaacttactggtctggtggcgaggttttcatcgtcaggaagccgcaaattaagcaatcagcaaccgttttcgtggctttacacttataagggtgttaagaagcccatcagtctgataaggttaagatattcattcagtctatttataatattaacaatcgttaagcgtacactctatggaaagccctactccacagcctgctcctggtagcgcgaccttcatggaaggatgcaaagacagtttaccgattgttattagttatattccggtggcctttgcgttcggtctgaatgcgacccgtctgggattctctcctctcgaaagcgtttttttctcctgcatcatttatgcaggcgcgagccagttcgtcattaccgcgatgctggcagccgggagtagtttgtggattgctgcactgaccgtcatggcaatggatgttcgccatgtgttgtatggcccgagtctgcgtagccgtattattcagcgtctgcaaaaaagcaaaaccgccctgtgggcgtttggcctgacggatgaggtttttgccgccgcaaccgcaaaactggtacgcaataatcgccgctggagcgagaactggatgatcggcattgccttcagtagttggagtagctgggtatttggtacggtaataggggcattctccggcagcggcttgctgcaaggttatcccgccgttgaagctgcattaggttttatgcttccggcactctttatgagtttcctgctcgcctctttccagcgcaaacaatctctttgcgttaccgcagcgttagttggtgcccttgcaggcgtaacgctattttctattcccgtcgccattctggcaggcattgtctgtggctgcctcactgcgttaatccaggcattctggcaaggagcgcccgatgagctatgaggttctgctgcttgggttactagttggcgtggcgaattattgcttccgctatttgccgctgcgcctgcgtgtgggtaatgcccgcccaaccaaacgtggcgcggtaggtattttgctcgacaccattggcatcgccagcatatgcgctctgctggttgtctctaccgcaccagaagtgatgcacgatacacgccgtttcgtgcccacgctggtcggcttcgcggtactgggtgccagtttctataaaacacgcagcattatcatcccaacactgcttagtgcgctggcctatgggctcgcctggaaagtgatggcgattatataacccacaagaatcatttttctaaaacaatacatttactttatttgtcactgtcgttactatatcggctgaaattaatgaggtcatacccaaatggatagtagctttacgcccattgaacaaatgctaaaatttcgcgccagccgccacgaagattttccttatcaggagatccttctgactcgtctttgcatgcacatgcaaagcaagctgctggagaaccgcaataaaatgctgaaggctcaggggattaacgagacgttgtttatggcgttgattacgctggagtctcaggaaaaccacagtattcagccttctgaattaagttgtgctcttggaagttcccgtaccaacgcgacgcgtattgccgatgaactggaaaaacgcggttggatcgaacgtcgtgaaagcgataacgatcgccgctgcctgcatctgcaattaacggaaaaaggtcacgagtttttgcgcgaggttttaccaccgcagcataactgcctgcatcaactctggtccgcgctcagcacaacagaaaaagatcagctcgagcaaatcacccgcaaattgctctcccgtctcgaccagatggaacaagacggtgtggttctcgaagcgatgagctaacgcgtcatctcgctcaaaaatccagatttataaaagaaaaaatgactggccagcatcgcaacatgctggcctttttggcaagcaggtcggctcagccgatgagttaagaagatcgtggagaacaatatgagcgcaaatgcggagactcaaaccccgcagcaaccggtaaagaagagcggcaaacgtaagcgtctgctcctccttctcaccttgctctttataattattgccgtagcgatagggatttattggtttttggtactgcgtcacttcgaagaaaccgatgacgcatacgtggcagggaatcaaattcaaattatgtctcaggtgtctggcagcgtgacgaaagtctgggccgataacaccgattttgtaaaagaaggcgacgtgctggtcactctcgacccgacagatgctcgccaggcgtttgaaaaagccaaaactgcactggcttccagcgttcgccaaacccaccagctgatgattaacagcaagcagttgcaggcgaatattgaggtgcagaaaatcgccctcgcgaaagcacaaagcgactacaaccgccgtgtgccgctgggcaatgccaacctgattggtcgcgaagagctgcaacacgcccgcgacgccgtcaccagtgcccaggcgcaactggacgtcgcgattcaacaatacaatgccaatcaggcgatgattctggggactaaactggaagatcagccagccgtgcaacaggctgccaccgaagtacgtaacgcctggctggcgctggagcgtactcgtattatcagtccgatgaccggttatgtctcccgccgcgcggtacagcctggggcgcaaattagcccaacgacgccgctgatggcggtcgttccagccaccaatatgtgggtggatgccaactttaaagagacgcagattgccaatatgcgtatcggtcagccggtcactatcaccacggatatttacggcgatgatgtgaaatacaccggtaaagtggttggtctggatatgggcacaggtagcgcgttcagtctgcttccagcgcaaaatgcgaccggtaactggatcaaagtcgttcagcgtctgcctgtgcgtatcgaactggaccagaaacagctggagcaatatccgctgcgtatcggtttgtccacgctggtgagcgtcaataccactaaccgtgacggtcaggtactggcaaataaagtacgttccactccggtagcggtaagcaccgcgcgtgaaatcagcctggcacctgtcaataaactgatcgacgatatcgtaaaagctaacgctggctaatccagaggtgcgtgtgatgcaacagcaaaaaccgctggaaggcgcgcaactggtcattatgacgattgcgctgagtctggcgacattcatgcaggtgctggactccaccattgctaacgtggcgatccccactatcgccgggaatctgggcagtagcctcagccagggaacgtgggtaatcacttctttcggggtggcgaatgccatcagcatcccgcttaccggctggctggcaaagcgcgtcggggaagtgaaactgttcctttggtccaccatcgcctttgctattgcgagctgggcgtgtggtgtctccagcagcctgaatatgctgatcttcttccgcgtgattcaggggattgtcgccgggccgttgatcccgcttagccaaagtctattgctgaataactacccgccagccaaacgcagcatcgcgctggcgttgtggagcatgacggtgattgtcgcgccaatttgcggcccgatcctcggcggttatatcagcgataattaccactggggctggatattcttcatcaacgtgccgattggcgtggcggtggtgttgatgacactgcaaactctgcgcggacgtgaaacccgcaccgaacggcggcggattgatgccgtggggctggcactgctggttattggtatcggcagcctgcagattatgctcgaccgcggtaaagagctggactggtttagtagtcaggaaattatcatccttaccgtggtggcggtggtggctatctgcttcctgattgtctgggagctgaccgacgataacccgatagtcgatctgagcttgtttaagagccgcaacttcaccatcggctgcttgtgtatcagcctcgcgtatatgctctacttcggcgctattgttctgctgccgcagttgttgcaggaggtctacggttacacggcgacctgggcaggtttggcctctgcgccggtagggattattccggtgatcctgagcccgattatcggccgcttcgcgcataaactggatatgcggcggctggtaaccttcagctttattatgtatgccgtctgcttctactggcgtgcctatacctttgaaccaggtatggattttggcgcgagcgcctggccgcagtttatccaggggtttgcggtggcctgcttctttatgccgctgaccaccattacgctgtctggtttgccaccggaacgactggcggcggcaagcagcctctctaactttacgcgaacgctggcggggtctatcggcacgagcataaccacgaccatgtggaccaaccgcgagagcatgcaccatgcgcagttgactgagagcgtaaacccgttcaacccgaatgcccaggcgatgtacagtcaactggaagggcttgggatgacgcaacagcaggcaagtggctggattgcccagcagatcaccaatcaggggctgattatttccgccaatgagatcttctggatgagtgccgggatattcctcgtcctgctggggctggtgtggtttgctaaaccgccatttggcgcaggtggcggcggaggcggtgcgcactaagtacaactaagccagttcatttgaactggcttttttcaattaattgtgaagatagtttactgattagatgtgcagttcctgcaacttctctttcggcagtgccagttcttcgttgctgttgatgcgtacgtcacgttccagaatgctacgcgcaatatcctgcgcttcctgcaagctgtgcatctggtaagtgccacactggtagacgttcagttccgggatctgattctgatcctgcactttcagcacgtcttccattgccgttttccaggcatcagcaacacgctgctcatctggcgtaccaatcagactcatataaaaaccggtgcggcagcccattgggctgatatcgataatctctacaccattaccgttaagatggttacgcataaaaccagcaaacaggtgctccagggtatggatccctctttctggcatcacttctttgttcggcacgcagaagcgcagatcgaacacggtgattgcgtcgccatgcggggtgttcattgttttcgccacccgaactgcaggcgcttccatccgggtatgatcgactgtgaagctatctaacaacggcatttagccacctccggtaatttttttaaaaattttctgaactctttcttcccaggcgagtctgagtatatgaaagacgcgcatttgttatcatcatccctgaattcagagatgaaattttggccactcacgagtggcctttttcttttctgtcaggcgtgtttttccagccacaccgcaaacggttcggtatcagcggcttccatttcctgctgacggcgttcagacgcctcgcgctcggctacaaaatcctcttcgcgcagaatttccagcggctcttcacgcagcagattacggtaggcttctgcaaatgctttgcctgttccgccaataccagtatcaatcatagaccttaagatacgggcagagaaagtcagatcgggattatcgaagcaggcaaccagttcatcacacactttctgatacgcttcgccgccgttaatactatccagcgtttgcgcgacgcgtttcagatcgcggaacagatctttacccacctgcggtaacgggaactgtgcggtttcgcagccgatacccagcgtcagacccggtttgcgaccttcgaggatcacccggttccagttaacgcgtgtacaggcaagttcgctactgctcatttccggtgcatcagccagcgcacaccagaccataaacaggtcgaggaatcgcacctgctgttcatctacaccaatcgggctgaacgggttgatgtccaggctacgcacttcaatatattcaatgccgccacgtaacagcgcatcagaagggctctcgccgctgcgggtaacgcgttttggacgaatcggcgcgtacagttcgttttcaatctgcaacacgttgctgttgatttgcagcctcttaccgtctttctcaataccaatcttcgcgtactcttcgcttggcgttttgattgcctgtttaaggcccgctacgtactcgtaaagatcgttgaaggtaataccaagattgctttggcttttattggtatagccgagatcgctcaaacgaagagaggtcgcatacggcaggtaatacataccgcactcggttttctcaaacggcaggctcgttggttttccttgcaggaaagaagaacaaatcgccggagatgcaccaaacagataaggaatgacccaaccgaaacgatagtaattgcggataacgcggaaatagcccgcagaaattttctctttggcatcagcgccgctgatatcaccgcacttcgcttgccagaatgccattggcaaagagaaattgtagtgcacgccggaaatggtttgcatcagcgcgccgtagcgatttttcagcccttcacgatacagcgttttaaagcgtccggtgttagaagtgccgtactgtgccagttcgatgtcctgaccttctgcgatgtagcatggcatacttaacggccacatccgctcatcgcccatattgcgcgccgtataacgatgcagatcgcgcataaaggtcagcatatgttcaatatcaccatccactggtgtaatgaattccagcaatgcttccgcaaaatcggtagtaatccatttgtgcgtcagtgcggaacctaatgcttcaggatgacctgttgttgccagtgtgccatcagcattaacacgcaaagtttcgcgctccagcccacgctgtatcccctttaacgcctgaggatgtttttccagccaggccagcgcctgacttacgtccgggatcaaattgacctcccgcctgtcaaaatcgttttaattagcataactgtaatggtgaccatatgtgcaggcctacaattagtgccaccacatcatgccctgaacggtcgctgctgcaactgcaacatagcgtaacgctttaccaaggcacaaaaaaaagattaccggtccccagctgatgcgcatccatcccgctaacagacacagtaaatcgccaaccacgggcatccagcttaataatagcgtgactgcaccatagcgtttcagccagccggtagctttctcttgccagcggcttgttttacgcaatggaaagaaacgcccaaggataacgttagttaaccctccaaggctattacccattgttgctgttaaaactaaaacccagggatgactgatcccggaaagcaacattgccaccagcacgacttcggagttgccgggtaatagtgtagcgctgagaaaactactggcaaacaagctgaaaaggcttaacgcttcactcacagcaagcgaacatccacggcgtccatgcctgctgcacgggccgcctgaataccgaaatcggcatcttcaaagaccacacactgcgtcggttgcacgcccatacgctgcgcgcacaacaaaaatgtgtctggcgcgggtttatggtgtttgacgtgatcggcagcgacgacggcgtcaaaataatggcgtaatcccaggtgcgccagcaatgcctcagcgatggcgctttcactccccgttcctacagccattgggcgacgaccatgccaacttttcaccacatcaacaagaggaagcggttcgacgctatccagcagcatacttcttactgcttctgttttttcacgcgctaacgcatgcgggtcgagatcggcctgattcagctcaataattgcctgagcaatacgccaggtggggcttccattaagcgcaatcatcgcctgaatatcgtactgaagaccgtagtgccctaatacttcgcgccacgctttacggtgcgtaggctccgtatccaggattgtgccatccatatcaaaaattaaacctgcataacgctcgtacatggtcttctcgcaagtcgaaaaatatgacgctactttagcgtaattgcttgattttgtcgctgatggcgaaggagaagaaaattcaggaaatggataaaggagttatttagaaatgagatatttttgaaggaaattttttggagaagatggtgcatccgggaggatgactcactgacgttcgcccttcgggccgttgctggcgcaacgttatccttcctggtgcctgcggttaataccgctatctcttcgataccttcattgctgaaggttacggagaatatggtgcatccgggaggattcgaacctccgaccgctcggttcgtagccgagtactctatccagctgagctacggatgcatcgggaaaacttattctactgctgatattgataccgctactaaagccatatcaattaagagatggtgcatccgggaggattactcgccttgcggctcgcccttcgggccgttgctaaagcaacgttatcatccctagtgcctgcggttaattccgctacctcttcgataccttcattgctgaagatttcggagaatatggtgcatccgggaggattcgaacctccgaccgctcggttcgtagccgagtactctatccagctgagctacggatgcatcgggaaatttattttactgctgatattgataccgctactaaagccatatcaagtaagagatggtgcatccgggaggattcgaacctccgaccgctcggttcgtagccgagtactctatccagctgagctacggatgcatcgggaaacttactttactgcagattttttgataccgctactaaagccgtatcaagtaagagatggtgcatccgggaggattactcgccttgcggctcgcccttcgggccgttgctaaagcaacgttatcctccctggtgcctgcggttattaccgccacctcttccataccttcatcgctgaaagtacgtagaatatggtgcatccgggaggattcgaacctccgaccgctcggttcgtagccgagtactctatccagctgagctacggatgcaaatggcggtgaggcggggattcgaaccccggatgcagcttttgaccgcatactcccttagcaggggagcgccttcagcctctcggccacctcaccacacgcctcttacgagtgcttcgaagaacttgtttatcgctcatcgtcgctgcgtggcgcacatattactttctgagacttataagtcaaacaatttttcctacacttttatcgtttgcacacttcacgttcaattagtctgtaaaaacgtcaaaaagagtgttttatcaacagaagaatggaggtctgacagatagtagtaatgcaaaaaaatggagacttaagttgaatgaacgggagtaaagcgaaaagactatagagtgaaggagaaattttgagggtgcgtctcaccgataaagatgagacgcggaaagattagtaactggactgctgggatttttcagcctggatacgctggtagatctcttcacggtgaacagaaacttccttcggggcatttacgccaatacgtacctggttgccctttacccctaaaactgtcacggtgacctcatccccaatcatgagggtctcaccaactcgacgagtcagaatcagcattctttgctccttgaaagattaaaagagtcgggtctctctgtatcccggcattatccatcatataacgccaaaaagtaagcaatgacaaacacattacatctaagcagtcatggcattacattctgttaaacctaagtttagccgatatacacaacttcaacctgactttatcgttgtcgatagcgttaatgcgaatgccgtgaagcgagtccacggcattgcctgacgcttatattattgcaatttcgcgctgacccagcctttcacactggctaacgctgcaggtaaggccgcagcatccgtaccaccggcttgcgccatgtcaggacgtccaccacccttgccgcccacctgctgagcgaccataccaatcagttcccctgctttcacacgatctgtgacgtccttagatacgcctgcaatcagagaaaccttaccttcgactaccgttgccagcacgataattgtgctccccagctgattttttaaatcgtcaaccatggtacgcaacattttcggctcaacaccgctaagctcgctaaccaacagcttaacaccattaacatcaattgccttactggaaagatttgcgctctcctgtgcggcagcttgttctttaagctgttgtaactctttttccagctgacgcgtacgttccagtacactgcgcactttatcagccagattattgctatcgcctttcagcagatgcgcgacttcgcttaagcgatcgctgtctgcatgaacggtggcgatagcaccttctccggttaccgcttcgatacgacgaacgcctgcagcagtaccgctttcagagatgatgcggaacagaccaatatcaccagtgcggctggcgtgagtaccgccacacaactcggtagagaaatcgcccatgctcagcacgcgtacgcgctcatcatacttctcgccgaacagcgccatcgcacctttcgctttcgccgcttcgagatccatgatgttggtttcgatcggcaaattgcgacgaatctgtgtgttcaccaggtcttcgaccgcacgaatctcttctggtttcatcgcttcgttgtgactgaagtcgaagcgcagcaccttgtcgttaaccagactacctttctggcttacatgagtacccagaacctggcgcagcgcagcgtgcatcaggtgcgttgcggagtgattcagacgaatacgggcgcgacgagcctcatcaacatcagcctgcaccgcgtcgcccactttcagagaacccgcagcaagtttaccgatgtgaccaatcgcctggccgtatttctgcgtatcttccaccgcaaaggagaagttagcgcctttcagttcgcctttatcgccaacctgaccgccggattccgcatagaatggcgtttgatccagcacgaccacagcttcctggcctgcattgatggcatcaaccgctttaccatcaacaaacagcgcagtcactttgccgttcagttccagatggtcatagcctttaaattcagatgcactgtcaacacggatcattgcgttgtaatcggcaccaaagccgctggcttcgcgcgcgcgacgacgctgctcttccattgcagcttcaaaaccagcttcgtcaactttgatgttgcgctcacgacaaacatcagccgtcaggtcaaccgggaagccataggtgtcgtacagacggaaagcagtttcaccatccagcgtatcaccagaaagttttgccagctcttcatccagcaacgccagaccgcgctccagagtacgagcaaactgctcttcttcagtcttcagcacctgctcaacctgcgcctgctggcgtttcaggtcttcacccgcagagcccataacgtcgatcagcggaccaaccagtttgtagaagaaggtttctttcgcgccgagcatattaccgtgacgcactgcgcgacgaatgatacgacgcagtacataaccacggttttcattggacggcattacgccatccgcgatcaggaacgcacaagaacgaatgtggtcagcgattacgcgcaggcttttattgctcagatcggttgcgccagtgactttcgctaccgcctggatcagcgtgcggaacaggtcgatgtcatagttagagttaacgtgttgcagcaccgcagcaatacgctccagacccataccggtatctacagacggcttcggcagcggttccatcgtgccatcggcctggcggttgaactgcatgaagacgatgttccagatctcaatgtagcggtcgccgtcttcttccgggcttcccggagggcccccccaaatgtggtcgccgtgatcgtagaagatttcggtgcacgggccgcacggaccagtgtcacccatctgccagaagttgtcagatgcgtatggcgcacctttgttatcgccgatgcgaataatacgttcgcgcgggatccctacttctttttcccagatttcgtaggcttcgtcgtcgctttcatagacggtaacccacagacgctctttcggcagggcaaaccatttttcgctggtcagcagttcccatgcaaactgaatggcatcgtgtttgaaatagtcgccgaagctgaagttgcccagcatttcgaagaaggtatggtgacgcgcggtgtaaccgacgttttccaggtcgttgtgtttaccacccgcacgcacgcagcgttgggaagtggtagcgcgggaataattacgcttgtcgagcccaaggaacacatccttgaactggttcatcccggcgttggtaaacaacaaagttgggtcgttatggggtaccagggagctgctggcaactacctgatgtcccttactatggaaaaagtcgagaaacgcctgacggatctcagcggtgctcttgctcataattatcctgaaatcaagctaacgaaatatcgccaccagctccagcgtgtcttaaccgccgggctggtaactgaaaagtgggaataagataagttttcttgactgggaagtaaaataccgtatgcgttcagtcggcaaaatttcgccaaatctcctggatatcttccatcagatagccacgatagagcagaaaacgctggatcttaactttttcactaaagacagttggcaaaggttcgccatattttcgcgtcgcctgatcgcgcgccagtgcgcaccagtcgatgtcacattcacgcatcgctttttctgtcgcttcgcgggaaatacctttctgattcagttcctggcgaatacgcgcaggtccataacctttgcggctacggctggcgataaagcgcgcaacaaatcggctgtcatcgagatagccatgttcatggcaccaggcaataacgcgctcgtaatcttctgccgtagcatcaatctcttctgggccatttttgcccataatcggtgccgcgagtttacgtcgcagttcttgctcactgtgatcgcgcaccgccagaatgcgtaccgcacgatccaacaggcgagcatatgccgggcgacgggatgtactttctgtcatggcatatccttacaacttaaaaaagcaaaagggccgcagatgcgacccttgtgtatcaaacaagacgattaaaaatcttcgttagtttctgctacgccttcgctatcatctacagagaaatccggcgtactgttcgggttgctcagcagcaactcacgtactttcttctcgatctctttcgcggtttccgggttatctttcagccaggcagtcgcattcgctttaccctgaccgatcttctcacctttgtagctgtaccacgcgcctgctttctcgatcagcttctcttttacgcccaggtcaaccagttcgccgtagaagttgataccttcgccgtagaggatctggaattcagcctgtttaaacggcgcagcgattttgttcttcaccactttcacgcgggtttcgctacccaccacgttttcgccctctttcaccgcgccgatacgacggatgtcgagacgaacagaggcgtagaatttcagcgcgttaccaccggtagtggtttccgggttaccgaacatcacaccaattttcatacggatctggttgatgaagatcagcagcgtgttggactgcttcaggttacccgccagcttacgcatcgcctggctcatcatacgtgccgcaaggcccatgtgagagtcgccgatttcgccttcgatttccgctttcggcgtcagtgccgccacggagtcaacgacgataacgtctactgcgccagaacgcgccagggcgtcacagatttccagtgcctgctcgccggtgtccggctgggagcacagcaggttgtcgatatcgacgcccagtttacgtgcgtagattgggtccagcgcgtgttcagcatcgataaacgcacaggttttaccttcacgctgcgctgcggcgatcacctgcagcgtcagcgtggttttaccggaagattccggtccgtagatttcgacgatacggcccatcggcagaccacctgccccaagcgcgatatccagactaaggctaccggtagagatggtttccacatccatggaacggtcttcacccaggcgcatgatggagcctttaccaaattgtttctcaatctggcccagtgctgccgccaacgctttctgtttgttttcgtcgatagccatttttactcctgtcatgccgggtaataccggatagtcaatatgttctgttgaagcaattatactgtatgctcatacagtatcaagtgttttgtagaaattgttgccacaaggtctgcaatgcatacgcagtagcctgacgacgcaccgcatcacggtcgccgctgaagcattcccgccgggtaatgccttcaccgcgggcagtggcaaaagcaaaccagacggtgccgacaggcttctcttcactgccgccatccggcccggcgataccactaatagacacggcataatcagcacgagccgctttcagtgcgcctatcgccatttccaccacgacgggttcactcaccgcgccatgctgcgccagcgtctcttcgcgtacgccgatcatctgcgctttggcttcgttactgtaggtgacaaatccgcgttcaaaccaggcggagctaccggcaatatcggtaatcactttcgctacccaaccaccggtacaagactcggcagttgttacggttgcgccacgggctttcagcgcctgcccaacctgttcacttaactgcatcagttcactgtcagtcatcacaacctctgtcagtcaaaaatttatgccggacaagatagcactttcgtcaggaagatggtgttggcgttgcaattttacgaggaggattcagaaaaaagctgattagccagagggaagctcacgcccccctcttgtaaatagttactgtactcgcgccagcgccacggcttgtcctaactgccagaccgccattgcgtaatgggtgctgtggttgtaacgggtgatggtgtagaagttcggcagaccgtaccagtactggtagccggtgccaacatccagacgcagcaggctggcttgttgatggttgcccagcggctgctgtggcgttaaacctgcggcggcaagctggctaatgctgtacttagttttgaagccatttggcaagcctggagcctgaccgtttgccattaccgcgacctgatcgcctttcacccagccgtgcgctttgaaatagttcgccacgctaccgatcgcatcaaccggatcccacaggttgatatgcccgtcgccgctgaaatctaccgcatattgtttgtaagagctcggcataaactgtccgtagcccatcgccccggcaaaggaacctttcagattgagcggatcgtcctgctcgtcgcgcgccatcaacaggaaggtttccagctcgccagagaaatactccgcgcggcgtgggtagttaaaactcagcgttgccagcgcatcgaggatgcgagttttccccatcacgcgcccccagcgggtttcaacgccgataatcccgacgataatttccggcggtactccatacacctgccacgcgcgattcaacgcatcttcatactgattccagaaaaccacaccgttctgcacgttgtccggcgtaataaattttttgcgataacggagccatgcgccgttcggaccacttggcggtttcacgcttgtggttggtgcctggttatccatcagccgcagtacgctatccagacgcttcgcctgggagagaatttcctgcaactgctgacgatcgaaaccgtgtttgttcaccattttgtcgatgaactgctgggcattcgggttattagcgaaatcgccgcccatctgcatcacattgtgctgcggctcaagcaggaagccgccagacggcgttccggtggtcgtatcagtctcagtaggttttggcttgctgctacaggcggcaagcaacacaaaaaggggaagcaatgttacataacgacgcttgaacatgaggggtccatttaacagattcaaccaggggcaagtatggtaaagcatcacgccccgcacaaggaagcggtagtcactgcccgatacggactttacataactcaactcattcccctcgctatccttttattcaaactttcaaattaaaatatttatctttcattttgcgatcaaaataacacttttaaatctttcaatctgattagattaggttgccgtttggtaataaaacaataaatcctgaaggagagaacaatgatagaaaccattactcatggtgcagagtggtttatcgggctgttccaaaagggcggagaggtgtttaccgggatggtgaccggcattcttccgctgttgattagcctgctggttatcatgaacgcactgattaattttatcggtcagcatcgtattgaacgttttgctcaacgttgcgccggtaaccctgtttcccgttacctactgttaccgtgcattggcacgtttgtcttttgcaatccgatgaccctaagcctgggtcgctttatgccggaaaagtacaaacccagctactacgcggcggcctcttatagctgccacagtatgaatggcctcttcccccatatcaaccctggcgaactgtttgtttatcttggcattgccagcggtctgacaacgctgaacctgccacttggcccactggcggtgagttatctgctggttggtctggtcaccaatttcttccgcggctgggtgaccgatctgaccaccgccatttttgagaaaaagatgggcattcaacttgaacaaaaagttcacctggcaggagcaacaagttgaaataacacctggcaggagcaacatcatgacgcatattcggatcgaaaaaggaacgggtggctggggcggcccgcttgagctgaaagccacgccgggaaaaaaaatcgtctatatcaccgccggtacccggcctgcgattgttgacaaactggcacagcttactggctggcaggctattgacggatttaaagaaggtgaacccgcggaggcggaaattggtgtcgcggtaatcgactgtggcggcacattacgctgcggcatctatccgaaacgacgtattcccaccattaatatccacagcacgggcaagtccggtccgctggcgcagtacattgtggaagatatttatgtctctggcgtaaaagaagaaaacatcactgtagtaggtgatgcgacaccacaaccctcttccgtgggccgtgactatgacaccagtaagaaaatcaccgaacaaagcgatggtttactggcgaaggtgggaatgggcatggggtccaccgttgcggtgctgtttcaatctggtcgtgacaccatcgacactgtattaaaaaccattctgccgtttatggcattcgtcagcgcgctcattggcatcattatggcttctggccttggtgactggattgcccacggtcttgctccgctggcgagccatccactgggtctggtcatgctggcgctcatctgttccttcccactgcttagtcctttcctcggcccaggcgcagttatcgcacaggttatcggcgtattgattggcgtgcagattggtctcggcaatattccgccgcatctggctttaccggcactgtttgccatcaacgcgcaggcggcctgcgacttcatcccggtcggtttgagcctggcggaagcccgtcaggacacggttcgcgtcggtgtcccttctgtactggtgagccgctttttaaccggcgcgccgactgtactgatcgcctggtttgtctccggttttatctatcaataaaggctgaaacatgaccgttatttatcagaccaccatcacccgtatcggcgcgagtgccattgacgccctcagtgaccagatgctcatcacctttcgtgaaggcgcgcctgcggacctcgaagagtattgcttcattcattgccacggcgagttgaaaggtgcactccatcccggtttgcaatttagtctcgggcagcatcgctatccggtgaccgctgttggcagcgtggcggaagacaaccttcgcgaactgggtcatgtcaccctgcgcttcgatggtttaaacgaagcggaatttccgggcactgtccatgtggcaggccctgtccccgacgatatcgcgccgggaagcgttttgaagtttgaatctgttaaggagtaaaaaatgaatcaggttgccgttgtcatcggtggtgggcaaaccttaggcgcgttcctgtgccacggtctggctgccgaggggtatcgcgtcgcggttgtcgatattcagagcgacaaagccgcaaatgtggcacaagaaattaacgccgaatatggtgaaagtatggcgtacggttttggtgctgacgccactagcgagcaaagcgttctggcgctctctcgtggggtagatgaaatctttggtcgcgtggatttgctggtctacagcgccggaatagcaaaagcagcctttatcagcgacttccagctcggcgattttgaccgtagcctacaggtgaatctggtgggttatttcctgtgtgcgcgtgaatttagccgtttgatgatccgcgacgggattcaggggcgcattattcagatcaacagcaaatccggcaaagtgggcagcaaacacaactctggctacagcgcagcgaaatttggtggcgtcgggctgactcaaagtctggcgctggatctggcggagtacggcattacggtgcatagtctgatgctcggtaacctgctgaaaagcccgatgttccagagtctgttgccacaatacgcgaccaagctgggtatcaaaccggatcaagtcgagcagtattacatcgacaaagtaccgctcaaacgcggctgcgattatcaagatgtgctgaatatgctgctgttctacgccagtcctaaggcgagctactgcaccggacagagcatcaatgtcaccggcggtcaggtgatgttctgatcaacagcggagatccattaaggatctccgtgagactatagaatgcctgatgcgctacgctcatcaggcatacaggacttccgccactacattaaggaaaagttatggtatccgcactcatcaccgtcgccgttatcgcctggtgtgcgcaactggccttaggcggctggcaaatttctcgttttaaccgtgccttcgacacactatgccagcaagggcgggttggcgtgggccgttccagcgggcgctttaaaccgcgggtcgtggtcgccatcgcgctggacgatcagcagcgcatcgtcgacaccttgtttatgaaaggactgaccgtcttcgcccgaccgcaaaaaattcccgcaattaccggtatgcatgcgggtgatttacagcccgatgtgatctttccccatgatccactaagtcagaatgctctaagtttggcgcttaaactgaaacgtggataatttcgttgtgaatgttacttgcttgcgaagttatcattttgaaacctaaatcaggtaatcacgcccatgaaacctcgtcagcgtcaggccgccattctggagtatctgcaaaagcagggtaaatgcagcgttgaagaattggcgcaatactttgacaccacaggcacaaccattcgcaaagatctggtcattctggaacatgccggaaccgtcattcgtacttatggcggagtggtgttgaataaagaggaatccgatccgcctatcgatcataaaacactcatcaacacccacaagaaagagctgattgcagaagctgccgttagttttatccatgatggcgatagcatcattcttgatgctggcagtaccgttttgcagatggttcccctgctcagccgctttaataacatcacggtgatgaccaacagcctgcatatcgtcaatgcgctatccgaactggataacgaacaaactatcctgatgccaggcggaacgtttcgcaaaaaaagcgccagttttcacgggcaactggcagagaatgccttcgagcatttcaccttcgataaattgtttatgggcaccgacggcatcgatctcaatgcgggcgtaaccacctttaacgaggtttataccgtcagtaaggcaatgtgcaatgccgcgcgcgaagtgattttgatggcggacagtagtaagtttggccgtaaaagccccaacgtagtttgcagtcttgaaagcgtcgataagctgattaccgacgcaggtatcgatccggcgtttcgtcaggcgctggaagagaaagggatcgatgtgatcataaccggagagagcaatgagtgaagcactactgaacgcgggacgtcagacgttaatgctggagttgcaggaagcaagccgtttaccggaacgtctgggcgatgattttgttcgcgccgccaatatcatcctgcactgtgaaggcaaagtggtggttagcggaattggcaaaagcggccacattggtaagaaaatcgccgcaacgcttgccagtaccggcactccggctttttttgtccatccggcagaagcgctgcacggcgatctggggatgatcgaaagccgcgatgtgatgctgtttatctcttactccggtggcgcgaaggaactggatctgattattccgcgtctggaagataaatctatcgcgctgctggcgatgaccggcaaaccgacgagtccgctgggcctggcggcaaaagcggtgctggatatctccgtagaacgcgaagcctgcccgatgcaccttgcgccgacctccagcaccgtcaataccctgatgatgggtgacgcgctggcgatggcggtcatgcaggcgcgcggatttaatgaagaagattttgcccgctcccacccagccggggcactgggcgctcgcttgctgaataaagtgcatcatctgatgcgccgtgacgatgccatcccacaggtggcgttaaccgccagcgtgatggatgcgatgctggaactcagccgcaccggtctggggctggtggcggtatgtgacgctcaacaacaggtacaaggcgtctttaccgacggcgatttacgtcgctggctggttggcggcggcgcactcaccacgccagtcaatgaagcgatgacggtcggcggcaccacgttgcaaagccaaagtcgcgccatcgacgccaaagagatcctgatgaagcgcaaaatcactgccgcaccggtggtggatgaaaacggcaaactcaccggcgcaataaacctgcaggatttctatcaggccgggattatttaatccttcaatcccagacgtttcgccagccgatgcaggttggcgacgtcggtttccagcatccgcgcgcaggcagcccagttgtgatgattttgtgccagtgcctgacgaatagtttcacgctggaacgcttctgtcgcttcacgcaggttttgcttaacaacgggcaccgccgccacttctggcgtcggcaacgtcacctcaggaaaagcaaaatgttgcgcctcaagaatcacttcatcgccgctgcgggtggctctcgccagaactaccgcccgatgaatagcatgttccagttcgcgcacgtttcccggaaaactgtagtgttgcagtaaatttcgcgctccggcacttaataccacgcgggagagcccctgccgcaaacgacactgctcgcagaaataccccgccagcagaatgacatcatcgccccgctcacgcagcggcggcacgctaagtggaaacacgctcaggcgatgaaacaaatcggcgcggaatcgccctgccagcacctcttcgcgtaaatcgcggttagtcgccgccagcacgcgcacatcgacccgcaaacaacggtcatcgccaacgcgctgaatatcgccatactgcaacaccctcagcagcttggcctgcaatgccaagctcaactcgccgatctcatccagaaacagcgtgccgttatccgccatttcaaacttcccgctgcgattactgatagcgccagtaaacgctcctttcacatgcccgaacaactcactttccgccacactttccggcagtgcagcacagttgagatagaccagcggattcaccgcccgtgggctggcttcatgaatcgctttcgccaccagctccttaccggttccagtctcaccgctgatcaggacgttgagatcggacgccgccacaatctcaatctcttttttcagttgcgtcatgccaggggacaagccaatcatctgcgtctgtttcaccgcttcaaacggcgtggcatcgcctggcagcatattctggctttccagttgttcaatcagcaacgcattgcttaacgctcccgccgccagcgcagcaatcagccgtagctcttcgtcgctgaaaacatcgaactgatcgggctgcatcccgtcgagcgtcagtgcgccgatcaggttttgcccggcaaacaatggcagaccaacgcaggcgtgaaccttcagactctcctgcccaggaatcaaaccgtcatagggatcgggcaattcgctgtctgcgggaaagcgcaccacatccccggcgcgggcaatcgcttccagccgtggatgcccttccagcgcaaagcgtctaccgagtacatcctttgccagaccgtcgatggcaagcggaataaactgccggctatcgtaacgtagcaacgcagacgcatcgcactccagcacctgacgtagcgtggtgatcaggcgctgaaaacgatcctggtgaccaatcccacgctgcaattcgatggcgatattcgccagcacatcaacggaaaaactcatctttgcctcactgtcaatttgactatagatattgtcatatcgaccatttgattgatagtcattttgactactcattaatgggcataattttatttatagagtaaaaacaatcagataaaaaactggcacgcaatctgcaattagcaagacatctttttagaacacgctgaataaattgaggttgctatgtctattgtggtgaaaaataacattcattgggttggtcaacgtgactgggaagtgcgtgattttcacggcacggaatataaaacgctgcgcggcagcagctacaatagctacctcatccgcgaagaaaaaaacgtgctgatcgacaccgtcgaccataaattcagccgcgaatttgtgcagaacctgcgtaatgaaatcgatctggcggatatcgattacatcgtgattaaccatgcagaagaggaccacgctggggcgctgaccgaactgatggcacaaattcccgatacgccgatctactgtacagccaacgctatcgacagcataaatggtcatcaccatcatccggagtggaattttaatgtggtgaaaactggcgacacgctggatatcggcaacggcaaacagctcatttttgtcgaaacaccaatgctgcactggccggacagcatgatgacttacctgacaggcgacgcggtgctgttcagtaacgatgctttcggtcaacactactgcgacgagcatctgttcaacgatgaagtggatcagacggagcttttcgagcagtgccagcgttactacgccaatatcctgacgccgttcagccgcctggtaacaccgaaaattaccgagatcctgggctttaacttaccagtcgatatgatagccacttcccacggcgtggtatggcgcgataacccgacgcaaattgtcgagctgtacctgaaatgggcggctgattatcaggaagacagaatcaccattttctacgacaccatgagcaataacacccgcatgatggctgacgctatcgcccaggggattgcggaaaccgacccacgcgtggcggtgaaaattttcaacgtcgcccgaagcgataaaaacgaaatcctgactaatgtcttccgcagtaaaggcgtgctggtcggcactagcacgatgaataacgtgatgatgccgaaaatcgccgggctggtggaggagatgactggtttacgcttccgtaacaaacgcgccagtgctttcggctctcacggctggagcggcggtgcggtggatcgtctttccacgcgcctgcaggatgcgggtttcgaaatgagccttagcctgaaagcgaaatggcgaccagaccaggacgctctgaagttatgccgtgaacacggtcgcgaaatcgcccgtcagtgggcgctcgcgccgctgccgcagagcacggtgaatacggtagttaaagaagaaacctctgccaccacgacggctgacctcggcccacggatgcagtgcagcgtctgccagtggatttacgatccggcaaaaggcgagccaatgcaggacgttgcgccaggaacgccgtggagtgaagtcccggataacttcctctgcccggaatgctccctcggcaaagacgtctttgaagaactggcaagcgaggcaaaatgagtaacggcattgtgatcatcggtagcggcttcgccgcccgccaactggtgaaaaatattcgcaaacaggacgccactattccattaaccctgattgccgccgacagcatggatgagtacaacaaacctgacctcagccatgttatcagtcaggggcaacgtgccgatgaccttacccgccagacggcgggtgaatttgccgagcagtttaatctgcacctgtttccacaaacctgggtgacggatatcgatgccgaagcccgtgtggtgaaaagccagaataatcagtggcaatacgacaagctagtactggcaaccggtgccagtgcctttgtcccgcctgtgcctgggcgtgagttaatgctgacgttaaatagtcagcaagagtatcgcgcctgtgaaacgcaactgcgggatgcccgacgcgtgttgattgttggcggtggtttgattggtagcgaactggcgatggatttttgtcgtgcaggcaaagcggtcacgctaatcgacaacgctgccagtattctggcgagcttaatgccaccggaagtaagcagccgcttgcagcatcggttgacggagatgggcgttcatctgctgttgaaatctcagttacaggggctggaaaaaacggattctggcattcaggcaacgctggaccgccagcgcaatatcgaagtggatgcggtaattgccgccaccggactgcgcccggaaaccgccctggcacgacgcgccgggctgacgattaatcgcggcgtttgcgtcgatagttatctgcaaaccagtaataccgatatttacgcgctgggcgattgcgcggaaattaacggtcaggtattgccgttcctccagccgattcaacttagcgcgatggtgctggcaaaaaatcttctcggcaataacacgccgctgaaactcccggcgatgctggtgaaaatcaaaacgccggaattaccgctgcatctggcaggcgaaacccagcgtcaggatttacgctggcaaattaataccgaacgccagggaatggtggcgcgcggcgttgacgatgctgaccagcttcgcgcctttgtggtcagtgaggatcggatgaaagaggcatttggattgttgaaaacattgccgatgtaagtgggctactgtgcctaaaatgtcggatgcgacgctggcgcgtcttatccgacctacggggacgcatgtgtaggccggataaggcgtttacgccgcatccggcaatggtgtccaaatgcaacacgttttatccgttctggacttcacccgctaaccaacgcgccgcagcaataaccccctgccccagagacaaaccgccatcacccgccggtaaactctgtggaaagagcaatgtgaaatcagcgagataatgcgccagacgtgcacgcagcaaacggttatgaataaccccgccgctaaataccagcgtagtgataccacgcatcgtggcctgctcacgcatcaacgcggcaaaaccctgcgccagcgcatcatgaaacgcccacgcgcgttgattaaccggtgcctgccagttcagccactgctgccagaaagtggcgagatccagttgattgtccacccgcggcattgtcaccggatgcgtcactccgtggcaactggctgcgagcgcctccagagcacaagccgcttcaccttcataacttaacgtggctggcgcacagcccagtgccgccgccactgcatcgaaaaaacgcccacagctactcgccagcggcgcgttaattccacgctcaatggcccgcgccagcacgctccagttttgctgttgcacacttgctgtttcagagtaattctgccactccggcacaaagcgcaggcactgcgccagcaggtttcgccacggctgcttcgctgccaaatcgccacccggaagcgccactgcaggcaagccgcccaggtgctcacattcgcgatagttcacccgcaggcactcgccgccccacaaagcgccgttctcccccataccgataccgtcgagcgtcaaagcaatgacatcaccgccatccagcggccactgatgctctgccagacacgccgctgcatgggcatgatgatgcagtaccgtttgcgtcggcagattcatttcacgcgcccactggctggagacatagcccggatgcgcgtcatgcacaacgtattgcggggtaaaatcgtagatgttttgcatcaggcgtaacgcttcgcgccactgcatctggatgccatcgtcacttaaatcgcccagatgctgactcaacaccgcttgttcaccgcgcaccaggcagaaggtatttttcagatccgcgccgagacacagcacaggcggaacatttttaaagcccggaggcaaagccagcgcatccggcacatacccccggctacggcgcagcatttcgccgctttcgcgcaccacgctatcatccatccgctgcacgatgtcgcggttatgtatcaagaatccgtcggcaatgccctgcaaatccgccagcgcctgttcgttgctgatagctggtggtttaccgctcaggttgccggaggtcatcaccagcgggcattgcagttcctgtaacagcaaatgctggagcgggttcgcaggcaacattaccccgacttcgttaaggtcaggggcgatatcatcacaaagctcaggaacgtattttttatccaccagcacaatcggcgcggcgggcgtggtaagcaactggcgcgcagcgtctggtaaaccgtcagccactggcaacatgaccgccagcggtttcgccgggcgatgtttgcgcgcccgaagtgtcgccaccgcgttactgttacgtgcatcgcaggcaagatgaaatccgccaatccctttgatggcgacaattttgcccatttttaactgtgcgatagctgcctgtaatgccgcctcttgttccgcatgttcaccatgacttacccattcaagatgcgggccacactccgggcaggccaccggctgggcgtggaagcgacgatcgagcgggtcacggtactctttgtcacaggccggacatagcggaaacgccgccatcacggtaaacgggcggtcgtaaggcatggcgcgaataatggtgaaacgcgggccgcagtgggtacagttgataaacggataacgataacgccgttcgcctggggtattcatttcggcaaggcaagcagggcaagtagcggcatcgggaacaatttgcgtattcatggtgccgcctgtgctctggcgtatagtgaactcggtgggcagttgactccagataaacggctcacgctcgacgctatcaatacgcgccagcggcgggcagtgctgatacaattgaacaagaaacgtttccgggtcttcccgcagccggacttctacgccatcgccgtcattacagacatcgccgtgaagatttaattgctgtgccagctgccagacaaacggacgaaaaccgacgccctgcactttgccacgaatacgcagttggacaccgcaagatgtgttttttgccattgagttattcccgccatcatgaattgcgtaacccgccctgccggacacgacagcgtcgcatccggcagtcacaggtcggcgataccgcccgctccgtattctacgaatatttccgggaattcctttgatgccagaacagttctgtaagatttttagaacatcagcgccgtacggcggcgtttttctgcgctcagttgttcaagtttattacgatcgacacaaatcagcgcatgagtcgggcaagccgccatacacgccgggccgtcttcacgatggttgcacaggtcgcatttattggcttcggctttgtcagcccgtacattcagacccgcgccgctgttgcggatcaccggacgtaccaccacttccatcgcaccatacgggcaagccacaacgcaggttttgcaaccaatgcaacgttcctgcatcacatgaacaaaccctttatcacggctgatagcaccattcgggcagacgttagcgcacggtgcatcttcacactgacggcaaactgtcgccgtggaaatgttcacacctttaatgacatggatacgcggtaaaaaagtttccggggtcaggcttgcacagtcctgattttcctgatgagaaaccacgcacgctacttcacaggtacggcaaccaatacatttactcgcgtcagcaatgatgaaacggttcatcaaattctccagcaatgacagttaatgcgccgatacattcacaaatcatgccagtttttaatttactgttatttaaggaaattaatttctgtaatgcaggaaaaacgatgtcatcgacactagtgacgatgacatgtgatgacaatgtttatcggctaggagcaatgagactgtcgcggcggatcagttttccgctgaaggttttcggcggactgaaatccccgccatcgagcataaaaatcagccgtccaataatttcctgaatcatctcagtcaccggaatttttacgctggagagcgccggaacggtgtagggggcaatagcgatatcatcgaatccgataacactcacctgctctggcaccgctacgccgcgctcgtgtaacgctttcatcgcacctatcgccatatcgtcgttactggcaactaacgcgctaaatttagccccacgttcgagcaacatttctaccccttcggccccgctggcaggcgtccatttaccgttagcgataagtttttcattgagcgcaataccatgctgcgccagcgcgtctttatacccggcaagacgttcaatgctggtgggggaatccatgctgccggtaaggaaagcaatctcctgatgcccggcgtttatcaactctgccacggcgttaaaactggtctgtttatgatcgcaccagacgctatggctgctgtttttgcgcaggcggcgattaagcaccattatcggctgactgtgcgcgtcaatgatgtcatcgatctcatccacgcttaaaaaacgcgggtaaatcatgatcgcgtcgcagcgcagatccagcagatactgaatcgcctggcgctcttcttctgcgctgtgtttaccatctgccaatagcaactgccgccctttctcttccgccattcgcgcggcatgaaagagtaattcactaaaataaatgccgtggtaaagcgtgttggtcactaccagccccagcgtctgagtactcttcgcgctcagattgcgcgccagcaagtttggacggtaaccgctctcttctaccgcctgaaacacgcgatctttagtctcctggctgacgtagccattaccactaagcacgcgggaaacggtcgctttactaaccccggcgcgcttcgccacttccagcatcgtcgtcatcattttcatccctttacacgcaatcaacgcagtgtactgcaccgtttgccgattgtccttgcacaatcggcgggaaaaatattcaggtgaccggtttcacaaatataaaaaatgaacaattcactctcttgcttatttagtgacaactattcatgattttgtgaaaccggtttcttaattccgtttcagcatcggcatttttccgtcacgtcgactgataacaactacatctaccctactgataacaggataaaatccgatggccaaaaattatgcggcgctggcacgcagcgtgatagcggcactgggcggcgttgataacatcagcgcggtcacgcactgtatgacgcggttgcgctttgttatcaaagatgatgcacttatcgacagcccgacgttaaaaaccatccccggcgtgctcggcgtggtacgtagtgacaaccagtgtcaggtgattatcggcaataccgttagtcaagcctttcaggaagtcgtcagcctgctgccgggagatatgcagcccgcacagcccgtgggtaaacccaaactcacgctacgtcgcattggtgcggggatcctcgatgcgctgatcggcaccatgagtccgctgatcccggcgattatcggcggaagcatggtcaaactgctggcaatgatcctcgagatgagcggcgtgctgacaaaaggaagcccgaccttaaccattctgaatgtgattggtgacggtgctttcttcttcctgccgctgatggtcgcggcatctgccgccatcaaatttaaaaccaatatgagcctggcgattgccatcgcgggtgtgctggtacatccgagttttattgaactgatggcgaaagcggcccagggtgaacatgtcgaatttgccctgattccggtcaccgcggtgaaatacacctacacggtgatcccggcgctggtgatgacctggtgcctgagttatatcgaacgctgggtggacagcattacaccggcggtgaccaaaaacttcctcaaaccaatgctgattgtgttgattgccgcaccgctggcaatcctgctgattggcccgattggtatctggatcggtagcgccattagcgcgctggtttacaccattcatggttatctgggctggcttagtgtcgccattatgggcgcgctgtggcctctgctggtaatgaccgggatgcaccgcgtctttacgccaaccatcattcagaccattgccgaaaccggcaaagaagggatggtcatgccgagtgagatcggcgctaacctgagcctgggcggtagtagtctggcagtggcgtggaaaacgaaaaacccggaactgcgtcagacggcgctggctgcggcggcaagtgccattatggcggggatttccgaaccggcgttatatggcgtggcgatccgcctgaaacgtccgcttatcgccagtcttatcagcggttttatttgcggcgcggttgccggtatggcggggcttgccagccacagtatggcagcgccggggctatttaccagcgtgcagttcttcgatccggcgaatccaatgagcatcgtctgggtgttcgcggtcatggcgctggcggtggtgctgagctttatcctcacactgttgctcggctttgaggatattcctgttgaggaagcggctgcccaggcgcgaaagtatcagagcgtacaaccgaccgtcgccaaagaagtaagtcttaattgaggatgaaaatgagtgtatttccagaaagttttttatggggcggcgcgcttgccgccaaccagtctgaaggtgcgttccgtgaaggtgacaaaggtctgaccactgtcgatatgatcccacacggcgagcatcgaatggcggtgaaactggggctggaaaaacgttttcagttgcgagatgacgagttttatcccagccatgaggcgacggatttttatcatcgttataaagaagatatcgccctgatggcagagatgggattcaaggttttccgtaccagtattgcctggagccgtctctttccgcagggcgatgaaatcacgcccaatcagcagggcattgctttttatcgttctgtctttgaagagtgtaaaaagtacggtatcgaaccgctggtcacgttgtgccacttcgatgtgccgatgcatctggtcaccgaatatggctcctggcgtaaccgcaagctggtggagtttttcagccgctacgccagaacctgctttgaagcatttgatggtctggtgaaatactggctaaccttcaatgaaatcaacattatgttgcatagcccgttctccggcgcgggtctggtgtttgaagaaggtgaaaatcaggatcaggtgaaatatcaggccgcgcatcaccagctggttgccagtgcgctagccaccaaaatcgcccatgaggttaacccgcaaaatcaggtgggctgtatgctggcgggcggtaacttctacccttacagttgcaagccggaagatgtctgggcggcgctggagaaagaccgggaaaacctgttttttatcgatgtgcaggcgcggggcacgtatccggcttactctgcccgcgtattccgcgaaaaaggggtaaccatcaacaaagcaccgggcgatgatgaaatcctgaaaaacaccgtcgattttgtctctttcagctattacgccagccgctgcgccagcgcggagatgaacgccaacaacagcagtgcggcgaacgtggtgaaaagcctgcgtaatccgtatctacaggtgagcgactggggctggggaattgatccactcggtctgcgtatcaccatgaatatgatgtacgatcgttatcagaagccgctgtttctggtggaaaacggcctgggcgcaaaagatgaatttgctgccaatggcgagattaacgacgactatcgcatcagctacttacgcgaacatatccgcgcaatgggcgaagcgattgcagacggcattccgctgatgggctacaccacatggggctgtattgatttagtttccgcctctacgggtgaaatgagcaaacgctacggctttgtctttgttgaccgtgacgacgcaggcaacggtacgctgacgcgcacgcgtaagaaaagtttctggtggtataaaaaagtgattgccagtaatggggaagatttagagtaagtaacagtgccggatgcggcgtgaacgccttatccggcctacatgtcgcacgaaccatgaaggcccgataagcgcagcgcatcgggcaatttagcatttggcatcagagctggttcaccccatcaagaacatccctgtcctgattccttaatgaaaaattactcttcttccaccgctaactgcgcgaagccgccatttccttcccagccttccagtcgttgataaacggtttctaccgcatctttaatcggctgggtcatcgggtagtaaaagccgacgatatccggctgaatgccgaggaaaatcacttcgccaatatcttctttcaactggtcgataaggtaattcaacggcatgttatgggtagtcatcataaacatctcggcgatatcatccgggtcgatgatgcggatctcgccggggtttagccccatatccgtggcgtcgacaatcagcagtcgtgtcgggcgcagttcacggatagcgacgatgtcgttttccggtgcgctaccgccgtcaatcaccacccagttacctttcggcgcggcggcgcacttttccgccagcagcggacctgcgccatcatcgcccatcatgctattgccaacacagagtaaaacgtcagtcacgcagtctcctcaccatcaaatagatggcgttttcctgatgaatatcatgcagcatacttaacagcattgtactccattcctgctgctggctagtttgcgctgcccgggctttatcgaatgcgttggccagcatcggcacatggttaatgtcgatgacgatctcaccatatttcggcacgccttccattttgcggcgggcttcactgcctgcctccagagtggcaatccatgccagatattcatcccacgggcaggtgagcgccgcttccaggcaatcgataaccccaaggtggtgaccaatcgccaggctgtaatagaccacctgctgcgcctcggcgggcgtggcatcgttctcatcaataaatttatggctcagttgactgaacaccaccttttcactcatcggatacgcgcctcttcaacaacatgattcagatggctgacaatctcgttcagacgcggatcgttttccgcttccagccagcgtgcaacctgttcttcgccctgccctaactgtgtaaggtaatcatcggcaatctgacgaccgtaacgataacccgccaggcgacgtgcttcgcgatccactttcacgcgcagcggctgcaccatatcaccatgcaggatctccgccggttgttcatccagttcacccggcccacgggcgtgaattttctgctccagcaggccgagcgccattgcaaagccgtacagcgtggcggcaggcgttggcgggcagccagggatataaacatccacagggacaattttatccgtaccgccccacacgcagtagagatcgtggaagatcccgccactgttaccgcaggcaccgtaggagatacaaattttcgggtccggcgcggactgccacgcacgcagcgcaggggatcgcattgcacgggtgaccgcgccggtaaacagtaaaatatccgcatgacgcggactaggaacgactttaatgccgaagcgttctgcatcaaacagcgggctaagcgtggcgaaaatttcgatttcgcaaccgttgcagccgccgcagtccacgcggtaaacataggcagaacgtttgatttttttcagtaagctcgccttcatgctggcgatggattcatccaccgtcatggggaccggaatgccgttggcgtcacgggggcctaataaattgctcatcagatggcctctttcatatggcgagtcagttcaatacggtcggacggcaccaggcatttctggcgcttacattccgggcaagtctcaaagctttcgcggtggttttccgcgcggctgtcgccgttgtgcttaagcagcgcaatggcgtagtcgatctctttctggacggcgaaaggacgattgcagacgcggcagttgcacagcgcgaagcgggactgttgcaggaagtcttctttcttccacaccgccagttcgtactcttggctcagtttgatcgccgccgtcgggcagacttcttcgcagcgtccacagaagatgcagtgcccaagattaaactcccaggcaagctctcctgtggcgaggtcagtttcaaccgttaaggcgttactcgggcaggcattgacgcaggccgcgcagccgatgcactgctgcgggttctgctctggcttaccacggaagtttttatcaaccgcaatcggctccagcggataagagctggtcgccgtgccggttttgatgacttttttgataaaggtaaacatggcgattccttatttcagcgggctgtttttacgctcaatgctgtaacgctcgagttctttgtacggcaccactttgctcttcttcttacgcacatcgaccacggtcatgcggtcggtacaggagtagcaagggtcgaggctaccgataatcagcggcgcatcggaaacggtgttgccgcgcagcatgtagcgcagggtcggccagttcgcgtaggtcgcggcacggcagcgccagcggtacagcttctggttgtcgccggtcatgctccagtggatatcatcgccgcgcggcgcttcggcaaagcccagcgcaaagcggtgcggaatgtaggtaaagccttccaccatcagtgggccacccggcaggttatccagaccgtagtcgatcatgttcagcgcggtatagacttcgttgatacgcactttcagacgggaaataacgtcgcagccctgctcgctgtggacttccattggcagcaggccatagccgacaaacgggtgatcggcgcgggtatcacgggcgtgaccgctggcacggaccatcgggccgacgttactgaagtcgcgagcgatttccgggtccagacgaccaatgccgacagtgcgctgttccatgttcggagtgctcagcagcacatccaccagctcctgcacttcacgacgcatctgttgtgccagctggcgggtctggatcatgtcgtctttcagcagatcgcgacgaatcccgccgatcaagttcaggccgtaggttttacgcgcaccggtaaggatctctgccattttcatggaggtttcacgcacgcggaagaactgcataaagccggagtcgaagccggtaaagtgacaggccaggccaaggttgagcagatggctgtgcaagcgttctacctccagcagaatggcgcggatcatctgcgcacgttctggcacctgaatacccatcgcgttttccacgctcgtggtgtaggcggtgctgtgggcaaagccgcagatcccgcacacacggtcagagaggaaggtcacttcgttataacccatacgggtttccgccagtttttccatgccgcgatggacgtagaacagacggtagtcggcgtcgataatgttttcgccatcgacgaacagacggaagtggcccggttcatcagaagtgacgtgcagcggaccaatcggcacgacgttgtttttcttgtcgcccagttcgttgatgaactcgtaggtttcagcatcggtggtcggtgccggacgctgacgataatccatgctgtctttacgcagcggataaagttcatccggccagtcatccggcagcaccagacgacgttcatccggcagaccaaccggaatcaaaccgtacatatcgcgcacttcacgctcgccccacaccgccgccggaacgcgcggcgtcacggacggatattccggtttgttggcgtcaacttcgacgcgaaccgtaatccaacacttagtgcccttctccatgctcagcacgtagtaaacggcgtaatgaccattcagtttgcgttcgtcgttaccaaacagcacgctcagccagccaccctgtttgtagtaaagaaactccaccacttccggcaggtagttcacctttacggtgacagtcagctgatctttggtctgccaggcgtggtccagcacgacgcccggaaatgcctcattcagcgcggcgagataatgttgacctaatttttcttcagacatgctcaaactctctttaatcacgccgccagcaaggagacgaacgctaaaaatgcaaagccaaacccagcccaggtaatgcgcggagtaatatcaagacgcagacgggccatgctgttttcgaacagcgcgataaccaggacgccgaccaccagttttacgatggcaatcaccagcgccagcagcagtccaccggcggtgaaggtttccatttgtccccacggaataaacaccccgacgaacatctgcaacaccaccagctgtttcaggctgataccccatttcatgacgccaaagccgctgccgctgtattcagagagcgggccttcctgcagctcctgctcggcttccgccaggtcgaacggcagtttgcccatttcgataaaggtggcgaacgcacaggcacaaagcgccagtaccagcgggatgctctggctcagcggccagtgataaacggtgtcggtgatgttgctgatgttggtggaaccggcaacctgtgcggcaacccacagaccaagcagcagcatcggttcgaccagcacgccaagcatcgcttcacggctcgcgccgatagcggtaaacgggctaccggtatccagaccagaaatggcaaagaagaaacgcgcgatggcaaagagatacagtaaggtgatcaaatcacccagttgcggcagcggagaaccgacggtcaccaccggcagcgcagtagcgatagtcagcatgacgcccaccatcacatacggcgtcaggcggaacacccagccggaggcatccgggccgacgctctgacgccccagcagtttgataatgtcgcgatactcctgcaacacgcccggcccgcgacggttatgcaagcgggcgcgcgccacgcgggttataccggagagcagcggcgcaacggcaaataacaccagcgcctgaattaacggatataaaacactcattctcaggctcctcgactaacaataatcaccaccagtaccgccagttcaaccagcgccatccggcggaacagcaacgcactcccctcgcactgccagcccggcaccagagacaccggattcagccatttgcgtagtttcagcaccggcgcaaacgcctgtttcaccggcatggcaaaaccgtgagcggtaatcaccatacttttttcgtggtcgtaaccgcacacccaggccgcaccgcgggaacggcttggcaaacgatcgcctttgcaaatcgccataatgatgaatggcagcagcgggcaggcaatcagcagcaacgtgatcatcggttgagaaacggtggtgttagcaggctccagcggcagaggtacagcagcagagagcatcggcagtagccacggcgcagcaacaccgccaattacgcagcaaatcgccagtgccactacgcttacgctcatcaggagcggcgcacaggtggcgttttcggcttctttggtgcgcggcgcgccgaggaacgtgacgccatagactttcgccatacacatcaccgccagcgcaccggtaattgccagccccacagcgagcagcggccccagcagacgggcaacaaacgcgccactattgctcagtttgaaaaaactttgatagataacccattccccggcaaaaccattcagcggcggcagcgcagccattgccatcagcccgactaacatggcgatggagataaccggcattttcttgccaataccaccgagtttttcgatatcgcgatgaccggtacggaaccagacgctccccgccccgaggaacagtacgcttttgaacaggctatggttaagcagatggtacagaccaccgaccaggccaagagcaatcagcgccggttgttcgagcgcgatacccgttacgccagcgcccagccccagcaggatgatgccgatattttccagggtgtggtaagccagcaggcgctggatgttgtgctccaccagcgcatacagaccaccgacaaacgcggtgatcatgccgagcaccagcagcgcgatcccccaccacagcggtgcattaccgcccagcagactcagggttaaaatgcccagcaggccaattttcatgactaccgtagaaaacaacgcggcagctggcgcagaggcgttcgcatgtgcctgcggcacccagccgtgcagcggaataatcccggccagcaggccaaagccaatcactccgagcagccagatatcggaaccgagcggcagctgttgcatacgcatatccagcaggcgcagatccagcgtgccgtaacgctgccacagcagccagcaagcaatcgccagcagcagagtgccaagacgccccagcgcaaaccacagtttgccctctttgctgttgctggtgaggaacaccgcgcacagggccatgatttcggccattaccacgaacatgccgaggttgctggcaatgacggcgcagacggcggcagccatcaacatattgatctgcaagccgttgcacttcacctgcgcgtggcgatgccagtcaatgttgtagaggctgacaaacagaccgcacagaccgagcgtaatcagccaaatcgcgttaagcggagagatttgcacatcgtagcttaccaggctcagcgcaccgctcacgccaaccgcgccagtcagtacagtgaagcccgcggctgccgtatacagactaccaaccgcgccgccaattccagctatccagccacttaacgctttttgaaaagaaaagagaaatgccagaacagcggcggcgacaaaccacgccacgccgctattgatcagggaaattgcgctcatttagcctctccactttgagcctgctgaaacaaggtgagatcgccaaagtccgtgttaaaggtcagctcacgcttacgtttgctgacgcgggcgatatcggtgttatccaccagatgcagggctttagtcgggcacatccgcacgcaggccggaccttgttcatcaaagctacaaaggtcacatttgacggcgatcgcgcgaatacctggcacccagtcaagcaatgtgctgacacgcgccggagcaggcggtgccggtggcgctttcggggtattggcgtttgccggaatatccagcggacggctgccggaaaattcaattgcgccaaacgggcaggcgatgccgcacagcttgcagcttacgcacaggctttcattcaactgcacggccccatcgacgcgggtgatggcgttaaccgggcagaccaccgcgcagggtgcatcttcacagtggtgacagagctgcggcgcagattctttttcattcagcatcactctcaggcgcggcatactttgcaggccgtgctggcgatgcgtctcactacaggcggcctcacaagtgtggcagccgatacagagcgtggagtcagcaattacaaaacgattcaccaggcattcctcaggtgattgtcatttttgacgaaaacatgccgatgaaatgtcattttcgacactcatcgacacgcccatccccaaacaggcgtaacgcctgcaaaacgggcaaagcctcagctcatgctgccgggctttgtccctttaccagttggcttaaattcaccggcacattgttttcaatagcggtgtataagctgtcgtaaacgccagcgattttttcgagatagtgttccagaacctgttcgcgatcgcggatgttgaccttgccatcaatcatgccgtcaatgctcagttgcgcctgcgcaatccgctgtttgtcttcgccatcttttgtttcgacgtaatactcgatggtgtggctgttaaagccatccgccagggtgacgtaaatgcgaaaatgttcaaaaaggacgaaacagagttctttgtccggcgcgcagctcatggcgtgatgcaggcgcgctttgcttaacgtgatcccctgaaccaggctattgcagtagatgtgccactggtcctgtaggcgacgatgccgctgtgcgatgtaatcggctttctcgcttatttcccaaatagtcattgtcaggttacccgtttaacagagatgccagctttaagcattttttgtgccaacttttaatttattgttattaaagagatttttaagctaaagatgaatttcgtcgccgtgtcgacgtgtcatttcgacatcatcgacattattcaccgcagggataatcaacactggcacaattattgcttgtagctggcaatagttaatgggaggcgatatgcacgaaataaccctctgccaacgggcactggaattgatcgaacagcaggccgcaaaacacggcgcaaaacgcgtaactggggtctggctcaaaattggcgcattttcttgtgtcgaaaccagctctcttgccttttgttttgatctggtttgccgcggcagcgtggcggaaggttgtaaactgcacctcgaagaacaagaggccgaatgctggtgtgaaacatgccaacagtatgtgacgctactgacccagcgcgtccgccgctgtccacagtgtcatggtgacatgctgcagattgtggcagacgacggtttacagattcggcggatagaaatagaccaggagtgagcgatgtgtacaacatgcggttgcggtgaaggcaacctgtatatcgagggtgatgaacataaccctcattccgcgtttcgtagcgcgccatttgccccggcggcacgcccgaagatgaaaatcaccggcattaaagcgcctgaatttacccccagccagactgaagaaggcgacctgcattacggtcatggcgaagcgggcactcacgcaccgggcatgagccagcgtcggatgctggaagtcgaaattgacgtgctggacaaaaataaccgtctggctgaacgcaaccgcgcgcgctttgctgcccgcaagcaactggtgctcaacctggtttccagccctggttccggtaaaaccaccctgctgacggaaaccctaatgcgcctgaaagacagcgttccgtgcgcagttattgaaggcgaccagcaaaccgtgaacgatgccgcacgcattcgcgctaccggcacaccagcgattcaggtgaacaccggtaaaggctgccatcttgacgcacagatgattgccgacgccgcaccgcgtctgccactggacgataacggtattctgtttatcgaaaacgttggcaacctcgtatgcccggccagcttcgatctcggtgaaaaacacaaagtggcggtgctttccgttaccgaaggtgaagacaaaccactgaaatatccgcatatgtttgccgccgccagcctgatgctgctcaacaaagttgacctgttgccgtatctcaactttgacgttgaaaagtgcatcgcctgcgcccgcgaagtcaatccagaaattgaaatcatccttatttccgccaccagcggcgaagggatggaccagtggctgaactggctggagacacagcgatgtgcataaggtaaaactggctggagacacagcgatgtgcataggcgttcccggccagatccgcaccattgacggcaaccaggcgaaagtcgacgtctgcggcattcagcgcgatgtcgatttaacgttagtcggcagctgcgatgaaaacggtcagccgcgcgtgggccagtgggtactggtacacgttggctttgccatgagcgtaattaatgaagccgaagcacgcgacactctcgacgccttacaaaacatgtttgacgttgagccggatgtcggcgcgctgttgtatggcgaggaaaaataatgcgttttgttgatgaatatcgcgcgccggaacaggtgatgcagttaattgagcatctgcgcgaacgtgctagtcatctctcttacaccgccgaacgccctctgcggattatggaagtgtgtggcggtcatacccacgctatctttaaattcggcctcgaccagttactgccggaaaacgttgagtttatccacggtccggggtgcccggtgtgcgtactgccgatgggtagaatcgacacctgcgtggagattgccagccatccggaagtcatcttctgtacctttggcgacgccatgcgcgtgccggggaaacagggaagcctgttgcaggcaaaagcacgcggtgccgatgtgcgcatcgtttacagcccgatggatgcgttgaaactggcgcaggagaatccaacccgcaaagtggtgttcttcggcttaggttttgaaaccactatgccgaccaccgctatcactctgcaacaggcgaaagcgcgtgatgtgcagaatttttacttcttctgccagcacattacgcttatcccgacgttgcgcagtttgctggaacagccggataacggtatcgatgcgttcctcgcgccgggtcacgtcagtatggttatcggcaccgacgcctataattttatcgccagcgattttcatcgtccgctggtggttgctggattcgaaccccttgatctactacaaggcgtggtcatgctggtgcagcagaaaatagcggcccacagcaaggtagagaatcagtatcgtcgagtggtaccggatgccggtaacctgctggcgcaacaggcgattgccgatgtgttctgtgtcaacggcgacagcgaatggcgcggcttaggcgtgattgaatcttctggcgtgcacctgacgccggattatcaacgattcgatgccgaagcacatttccgcccggcaccgcagcaggtctgcgatgacccgcgcgcgcgttgtggtgaggtattaacgggcaaatgtaagccgcatcaatgcccgctgtttggtaacacctgtaatcctcaaaccgcgtttggtgcgctgatggtttcctccgaaggagcgtgcgccgcgtggtatcagtatcgtcagcaggagagtgaagcgtgaataatatccaactcgcccacggtagcggcggccaggcgatgcagcaattaatcaacagcctgtttatggaagcctttgccaacccgtggctggcagagcaggaagatcaggcacgtcttgatctggcgcagctggtagcggaaggcgaccgtctggcgttctccaccgacagttacgttattgacccgctgttcttccctggcggtaatatcggcaagctggcgatttgcggcacagccaatgacgttgcggtcagtggcgctattccgcgctatctctcctgtggctttatcctcgaagaaggattgccgatggagacactgaaagccgtagtgaccagcatggcagaaaccgcccgcgcggcaggcattgccatcgttactggcgatactaaagtggtgcagcgcggcgcggtagataaactgtttatcaacaccgctggcatgggcgcaattccggcgaatattcactggggcgcacagacgctaaccgcaggcgatgtattgctggtgagcggtacactcggcgaccacggggcgactatccttaacctgcgtgagcagctggggctggatggcgaactggtcagcgactgcgcggtgctgacgccgcttattcagacgctgcgtgacattcccggcgtgaaagcgctgcgtgatgccacccgtggtggtgtaaacgcggtggttcatgagttcgcggcagcctgcggttgtggtattgaacttagtgaagcggcactgcctgttaaacctgccgtgcgtggcgtttgcgaattgctgggactggacgccctgaactttgccaacgaaggcaaactagtaatagctgttgaacgcaacgcggcagagcaagtgctggcagcgttacattcccatccactggggaaagacgcggcgctgattggtgaagtggtggaacgtaaaggtgttcgtcttgccggtctgtatggcgtgaaacgaaccctcgatttaccacacgccgaaccgcttccgcgtatatgctaataaaattctaaatctcctatagttagtcaatgaccttttgcaccgctttgcggtgctttcctggaagaacaaaatgagttatacaccgatgagtgatctcggacaacaagggttgttcgacatcactcggacactattgcagcagcccgatctggccagcctgtgtgaggctcttagccaactggtaaagcgttctgcgctcgccgacaacgcggctattgtgttgtggcaagcgcagactcaacgtgcgtcttattacgcgagccgtgaaaaagacacccccattaaatatgaagacgaaactgttctggcacacggtccggtacgcagcattttgagccgccctgatacgctgcattgcagttacgaagaattttgtgaaacctggccgcagctggacgcaggtgggctatacccaaaatttggtcactattgcctgatgccactggcggcggaagggcatatttttggtggctgtgaatttattcgttatgacgatcgcccctggagcgaaaaagagttcaatcgtctgcaaacatttacgcagatcgtttctgtcgtcaccgaacaaatccagagccgcgtcgttaacaatgtcgactatgagttgttatgccgggaacgcgataacttccgcatcctggtcgccatcaccaacgcggtgctttcccgcctggatatggacgaactggtcagcgaagtcgccaaagaaatccattactatttcgacattgacgatatcagtatcgtcttacgcagccaccgtaaaaacaaactcaacatctactccactcactatcttgataaacagcatcccgcccacgaacagagcgaagtcgatgaagccggaaccctcaccgaacgcgtgttcaaaagtaaagagatgctgctgatcaatctccacgagcgggacgatttagccccctatgaacgcatgttgttcgacacctggggcaaccagattcaaaccttgtgcctgttaccgctgatgtctggcgacaccatgctgggcgtgctgaaactggcgcaatgcgaagagaaagtgtttaccactaccaatctgaatttactgcgccagattgccgaacgtgtggcaatcgctgtcgataacgccctcgcctatcaggaaatccatcgtctgaaagaacggctggttgatgaaaacctcgccctgaccgagcagctcaacaatgttgatagtgaatttggcgagattattggccgcagcgaagccatgtacagcgtgcttaaacaagttgaaatggtggcgcaaagtgacagtaccgtgctgatcctcggtgaaactggcacgggtaaagagctgattgcccgtgcgatccataatctcagtgggcgtaataatcgccgcatggtcaaaatgaactgcgcggcgatgcctgccggattgctggaaagcgatctgtttggtcatgagcgtggggcttttaccggtgccagcgcccagcgtatcggtcgttttgaactggcggataaaagctccctgttcctcgacgaagtgggcgatatgccactggagttacagccgaagttgctgcgtgtattgcaggaacaggagtttgaacgtctcggcagcaacaaaatcattcagacggacgtgcgtctaatcgccgcgactaaccgcgatctgaaaaaaatggtcgccgaccgtgagttccgtagcgatctctattaccgcctgaacgtattcccgattcacctgccgccactacgcgagcgtccggaagatattccgctgctggcgaaagcctttaccttcaaaattgcccgtcgtctggggcgcaatatcgacagcattcctgccgagacgctgcgcaccttgagcaacatggagtggccgggtaacgtacgcgaactggaaaacgtcattgagcgcgcggtattgctaacacgcggtaacgtgctgcagctgagtttgccagatattgttttaccggaacctgaaacgccgcctgccgcaacggttgtcgccctggagggcgaagatgaatatcagttgattgtgcgcgtgctgaaagaaaccaacggcgtggttgccgggcctaaaggcgctgcgcaacgtctggggctgaaacgcacgaccctgctgagtcggatgaagcggctgggaattgataaaagcgcattgatttaactgcaaattgccggacagatctgcctgtccggcatattattcatgaggttttttcggacgatatttttccggcagttctggcaccggacgcttgtcatcgatgagatgacgcacggttaagatcggatgacgccacagcattctcggcccggcccaacgcataatctgtttcatctcttcacgctttgcaggctggtaacagtgcaccggacactgcttacaggctggtttctcttcgccgaacacacatttatccagccgcttttgcgcgtaaacaaacaacgcctcgtaatgctccggctccgcactcgcctgcgggcatttcgcttgataaagatcgatcatttttttaatcgtcagtttttcacgagagatacgcttgccggacatgctgcctccacctcattaagatgtatttatattacatcttaatcttaaagggcactatgactccaaagaagaagggttagccaaccgatacaattttgcgtacttgcttcataagcatcacgcaaaagctgcaaaacagcatctttcccggaaccagcatcaagaactcgccgttcgcttcttcccctgaaatgattaactccggtatcatgtgcgccttatgtgattacaacgaaaataaaaaccatcacaccccatttaatatcagggaaccggacataaccccatgagtgcaatagaaaatttcgacgcccatacgcccatgatgcagcagtatctcaggctgaaagcccagcatcccgagatcctgctgttttaccggatgggtgatttttatgaactgttttatgacgacgcaaaacgcgcgagccaactgctggatattagtctgaccaaacgcggtgctagcgcgggagagccgatcccgatggcggggattccctaccatgcggtggaaaactatctcgccaaactggtgaatcagggagagtccgttgccatctgcgaacaaattggcgatccggcgaccagcaaaggtccggttgagcgcaaagttgtgcgtatcgttacgccaggcaccatcagcgatgaagccctgttgcaggagcgtcaggacaacctgctggcggctatctggcaggacagcaaaggtttcggctacgcgacgctggatatcagttccgggcgttttcgcctgagcgaaccggctgaccgcgaaacgatggcggcagaactgcaacgcactaatcctgcggaactgctgtatgcagaagattttgctgaaatgagcttaattgaaggccgtcgcggcctgcgccgtcgcccgctgtgggagtttgaaatcgacaccgcgcgccagcagttgaatctgcaatttgggacccgcgatctggtcggttttggcgtcgagaacgcgccgcgcggactttgtgctgccggttgtctgttgcagtatgcgaaagatacccaacgtacgactctgccgcatattcgttccatcaccatggaacgtgagcaggacagcatcattatggatgccgcgacgcgtcgtaatctggaaatcacccagaacctggcgggtggtgcggaaaatacgctggcttctgtgctcgactgcaccgtcacgccgatgggcagccgtatgctgaaacgctggctgcatatgccagtgcgcgatacccgcgtgttgcttgagcgccagcaaactattggcgcattgcaggatttcaccgccgggctacagccggtactgcgtcaggtcggcgacctggaacgtattctggcacgtctggctttacgaactgctcgcccacgcgatctggcccgtatgcgccacgctttccagcaactgccggagctgcgtgcgcagttagaaactgtcgatagtgcaccggtacaggcgctacgtgagaagatgggcgagtttgccgagctgcgcgatctgctggagcgagcaatcatcgacacaccgccggtgctggtacgcgacggtggtgttatcgcaagcggctataacgaagagctggatgagtggcgcgcgctggctgacggcgcgaccgattatctggagcgtctggaagtccgcgagcgtgaacgtaccggcctggacacgctgaaagttggctttaatgcggtgcacggctactacattcaaatcagccgtgggcaaagccatctggcacccatcaactacatgcgtcgccagacgctgaaaaacgccgagcgctacatcattccagagctaaaagagtacgaagataaagttctcaccagtaaaggcaaagcactggcactggaaaaacagctttatgaagagctgttcgacctgctgttgccgcatctggaagcgttgcaacagagcgcgagcgcgctggcggaactcgacgtgctggttaacctggcggaacgggcctataccctgaactacacctgcccgaccttcattgataaaccgggcattcgcattaccgaaggtcgccatccggtagttgaacaagtactgaatgagccatttatcgccaacccgctgaatctgagcccgcagcgccgcatgttgatcatcaccggtccgaacatgggcggtaaaagtacctatatgcgccagaccgcactgattgcgctgatggcctacatcggcagctatgtaccggcacaaaaagtcgagattggacctatcgatcgcatctttacccgcgtaggcgcggcagatgacctggcgtccgggcgcagtacctttatggtggagatgactgaaaccgccaatattttacataacgccaccgaatacagtctggtgttaatggatgagatcgggcgtggaacgtccacctacgatggtctgagcctggcgtgggcgtgcgaggaaaatctggcgaataagattaaggcattgacgttatttgctacccactatttcgagctgacccagttaccggagaaaatggaaggcgtcgctaacgtgcatctcgatgcactggagcacggcgacaccattgcctttatgcacagcgtgcaggatggcgcggcgagcaaaagctacggcctggcggttgcagctctggcaggcgtgccaaaagaggttattaagcgcgcacggcaaaagctgcgtgagctggaaagcattagcccgaacgccgccgctacgcaagtggatggtacgcaaatgtctttgctgagtgtaccagaagaaactagccctgcggtcgaagctctggaaaatcttgatccggatagtctcaccccgcgtcaggcgctggagtggatttatcgcttgaagagcctggtgtaataacaattcccgatagtcttttgctatcgggaatattaacgacaactgacgaataaaataaaaacaccctgtataataggaaagcttattttacagggtaaaaccatgccatctacacgctatcaaaaaatcaatgcccatcactatcgccatatatgggtcgttggtgatattcatggtgaatatcagttattacaatcccgcttacatcaactctcttttttccccaaaatcgacttacttatttctgtcggcgataatattgatcgtggaccggagagtcttgacgtcctgcgcctgctaaaccaaccctggtttacgagcgttaaaggcaaccacgaagcgatggcgcttgaggcattcgaaactggcgatggcaatatgtggcttgccagcggtggtgactggtttttcgatttaaatgatagtgagcaacaagaggcaatagatctgttgctgaaattccatcaccttccacatattattgaaatcactaacgacaacataaaatatgccatcgcacatgcagattatccggggagtgaatatctctttggtaaagaaatagcggagagcgaattactctggcctgttgatcgtgtgcagaaaagccttaatggcgagttacaacaaataaacggcgctgattattttatatttggacatatgatgtttgataacattcagacgttcgctaaccagatttatattgataccggaagcccgaacagcgggcggctgagtttttataaaataaagtaatctcatgcttcttctgtgaagcatgagtaacccggtgttattgcaggccattattcatttttcgctaccagcaaagagagatcctgcttcaccagcgcgcgactggcactctccggcaaaccgtcgtctgtaataatctgatcaaactcgcttaatggtaacgccagccatgtcgccacctgaccatatttcgtcgcatcacagaccaaaactcgctggcggctggcactggcaatcgcccgtttcaccgtgactttatcttccgctggcgtagaaatcccccgcacactccaactgcttgcagaaataaaagcctgatcaatcatcaggctgcgcagcatggtcgcagcggcttccccgacacaggaacggttttcccgacacactgcaccgccagtgtgaataattgtgcaattactgttgtcgagcaagtagtccgcaataacgaaatcgtttgtgaccacagtcagactctccatgtgaatcagatgctgtgctatcgctaacgtggtcgttcccgcatccagatagatacaacttcccggctgaacaagacttgccgccagcttgccaatagccgctttttgcgtcattgccagcgcagtttttacctgatgagaaggttcatgcgccacgcgtcccggagactggacgcctccggacaccagcacaacggctccctgctgctccagtttttgtaaatcccgacgaatggtcatatgactcacattcattctgtccgttagttcagcaatactgacaatgcctttttcagctaccatctcaaggatgatttggcgacgctctacgggtatcaacttttgctccttcctttgtcctgcactcattctacgctatttgcctgcgaaacgtgcgcggcgcaactaacgcttagttcacataaaataacacacaatgttaatttatgtgaatcagatcaccataccgttatcttccagcgcttatattcacaatatcaaacaaaatatcacttaaattaacaaggagagcagatgaaaacgggatctgagtttcatgtcggtatcgttggcttagggagtatgggaatgggagcagcactgagttatgtccgcgcaggtctttctacctggggcgcagacctgaacagcaatgcctgcgctacgttgaaagaggcaggtgcttgcggggtttctgataacgccgcgacgtttgccgaaaaactggacgcactgctggtgctggtggtcaatgcggcccaggttaaacaggtgctgtttggtgaaacaggcgttgcacaacatctgaaacccggtacggcagtaatggtttcttccactatcgctagtgctgatgcgcaagaaattgctaccgctctggctggattcgatctggaaatgctggatgcgccagtttctggtggtgcagtaaaagccgctaacggtgaaatgactgtcatggcctccggtagcgatattgcctttgaacgactggcacccgtgctggaagccgttgccggaaaagtttatcgcataggtgcagaaccgggactaggtagcaccgtaaaaattattcaccagttgttagcgggcgtacatattgctgccggagccgaagcgatggcacttgcagcccgtgcggggatcccgctggatgtgatgtatgacgtcgtgaccaatgccgccggaaattcctggatgttcgaaaaccggatgcgtcatgtggtggatggcgattacaccccgcatagtgccgtcgatatttttgttaaggatcttggtctggttgccgatacagccaaagccctgcacttcccgctgccattggccagtacagcattgaatatgttcaccagcgccagtaacgcgggttacgggaaagaagacgatagcgcagttatcaagattttctctggcatcactctaccgggagcgaaaagttgagctaaactctaccgggagcgaaatcatgatcaagattggcgttatcgccgatgattttaccggcgcgacggatatcgccagttttctggtggaaaacggtctaccaacggtacaaattaacggtgttccaacaggtaaaatgccggaagcaatcgacgcactggtgatcagcctgaaaacgcgctcctgtccagtggttgaagccacacagcaaagcctggcggctctgagctggttgcaacagcaaggttgcaaacagatctatttcaaatactgctctactttcgacagtacggcgaaaggtaatattggcccggttaccgatgccttaatggatgctctcgacacgccgtttacggtcttctctccggccctgccggtcaacggacgtacggtttatcaggggtatttgttcgtaatgaatcaactgctggccgaatccgggatgcgccatcacccggtaaatcccatgaccgacagctatcttccccgtctggttgaagcgcaatccacagggcgctgcggcgtcgttagcgcacatgttttcgaacaaggtgtggatgccgttcgtcaagagctggctcgcttacagcaagagggctaccgctacgcggtgcttgatgcgctgaccgaacaccatctggaaattcagggagaagccttgcgcgatgccccactggtaacgggcggttctggtctggcgattggcctggcccggcagtgggcgcaagaaaacggtaaccaggctcgcaaagcagggcgtccgctcgctgggcgcggcgtagtgctctccggtagttgctctcaaatgaccaaccgccaggtagcacattaccgtcaaattgcaccagcccgtgaagttgatgtggcacgctgcctcagtattgaaactctggccgcttatgcacacgaactggcagagtgggttctgggccaggaaagtgtacttgctccactggtttttgccaccgccagcactgacgcattggcagcaattcaacagcaatacggtgcacaaaaagccagtcaggcagtagaaacactgttttctcaactagcggcgcggttagcagcggaaggcgtgacacgctttattgtcgcaggcggtgagacctccggcgtagtcacacagagcctgggaataaaagggtttcatattggcccaaccatttccccggcgtgccgtgggtaaacgcactggataagcctgtctcactcgcccttaaatctggcaacttcggtgatgacgcctttttttcacgagcccaaagagagtttttatcatgagcgatttcgcaaaagtagagcagtctttgcgagaggagatgacgcggattgccagtagtttctttcagcgcggctatgcaaccggtagcgctggcaatctgagcctgcttttacctgacgggaatttactggcgacaccgacaggtagttgcctgggcaatctcgatccgcagcggctttccaaagtcgccgcggatggcgaatggttaagtggtgacaaacccagcaaagaggtgctctttcatctggcgctgtatcgcaacaatccgcgctgtaaagcggtggtgcatttgcacagcacatggagcacggcgctttcctgcctgcaagggctggacagcagcaacgttattcgtccgttcacaccatacgtggtgatgcggatgggaaatgtcccgctggtgccttattaccgaccgggcgataaacgcatcgcacaggatctggcggaactggcagcagacaatcaggcttttttactggcaaatcatggcccagtggtttgcggtgaaagcctgcaagaagccgccaacaatatggaagagctggaggaaacggcaaagctgatttttattctcggtgaccgcccgatccgttatctgaccgcaggtgaaattgcggaattaaggagttaatgcaatgcctcgttttgcagctaatttatccatgatgttcaccgaagtgccttttattgaacgcttcgccgcagcgcgaaaagccgggttcgatgctgtggaatttctgtttccctataactactccaccctgcaaatccaaaagcaactggagcaaaaccatctgacactggcgctgttcaataccgctcccggagatattaatgcgggggaatggggattatccgcccttcccggacgtgagcacgaagcacacgcagacatcgacctggcactggaatatgcattggcgctcaattgtgaacaagtccatgtgatggcaggcgtcgtgcccgctggcgaagatgctgaacggtaccgggcagtatttatcgataatatccgctacgctgccgaccgctttgcgccacacggcaagcgaatattagttgaagcactcagccccggcgttaagcctcattatctcttctccagccagtatcaggcactggctattgttgaagaggttgcgcgagataacgtgtttattcaactagatacttttcatgcgcaaaaagtagatggcaacctgacgcatttaatccgcgactacgccgggaaatatgcgcacgtacaaattgccggactacctgatcgacatgaaccggacgatggagaaatcaactatccgtggctgttccgcctgttcgatgaggtgggatatcagggctggatcggttgtgaatataaacctcgtggcctcaccgaagaagggcttggctggtttgacgcctggcgctaattcgttaaatccctaattacaacgtacccatacatccccccatctacggatggggtaggttaactataactttcagacagggtttcccatgtccacaattacattgttatgcattgcgttagctggcgtaatcatgctgttgctgctggtcatcaaggcaaaggtacaaccattcgttgctttgctcctcgtcagcctgttagtcgcacttgcggcaggtataccggcgggcgaagtgggtaaagtgatgatcgccgggatgggcggtgtgcttggttccgtcactattattattggtctgggcgctatgctggggcgtatgatcgaacactctggtggtgcagagagtctggctaattatttcagtcgcaagttaggtgacaaacgaactatcgctgcgctgactctggcagcgttcttcctcggtattcccgtcttctttgatgtcggctttattattcttgcgccaatcatttacggttttgccaaggttgccaaaataagcccactcaaatttggcctgcctgtcgctgggatcatgctcactgttcacgtggcggtaccgccgcatccaggccctgtcgccgcagcggggttactccacgcagacatcggctggctaaccatcatcggtattgcgatttctattcccgtaggggttgttggctactttgcagcgaaaataatcaataagcgccaatatgcgatgagtgtagaagtactggaacagatgcaactggctccggccagtgaggaaggcgcgacaaaattaagcgataaaataaatccaccgggcgtcgcgctggtcaccagcctaattgttattcctatcgcgattatcatggcgggtacggtttccgcaacactgatgccgcctagccatcccctgcttggtacgctacagctgatcggcagtccaatggtagctctaatgattgcgctggtgctggcattctggttattggctttacgtcgcggctggagcttacaacacaccagcgacattatgggcagtgcgcttcctactgcggcggtagtgattttggttactggtgctggaggggtatttggcaaagtgctggtggaaagcggcgtcggcaaagcccttgccaacatgctacaaatgattgacctgcctctgttaccagccgcatttattattagtctggcgctgcgtgcaagccaggggagtgcaaccgtagcaatactgacaaccggcgggttactcagtgaagcggtgatgggattgaatccgattcagtgcgtattggtgacgctggcagcctgctttggtgggcttggtgcgagtcatattaatgacagtgggttctggattgtgaccaaatatctggggttgagcgtagcagacggtctgaaaacctggacagtgttaacgaccattctcggttttaccggattcttaattacctggtgcgtatgggcggtaatttgaccttaataaaaaggtccgatgggcatcggaccttttattgtgcacagaaaaggccagcctcgcttgagactggcctttctgacagatgcttacttactcgcggaacagcgcttcgatattcagcccctgcgtttgcaggatttcgcgcaaacggcgcaggccttcaacctgaatctggcgaacacgttcacgggtgaggccaatttcacgacctacatcttccagtgttgccgcttcgtaccccagcaaaccgaatcgacgtgccagcacttcacgctgtttggcgttcagctcgaacagccatttgacgatgctctgcttcatatcgtcatcttgcgtggtatcttccggaccgttctctttttcatcggccaggatgtccagcaacgctttttcggaatcaccacccagcggggtgtctacgctggtaatgcgctcgttaagacgaagcatacggctgacgtcatcaactggcttatccagttgctctgcgatctcttccgcacttggttcatggtccagcttatgggacaactcacgtgcggttcgcaggtaaacgttcagctcctttacgatgtgaatcggcaaacgaatagtacgggtttggttcataatcgcccgttcaatcgtctggcgaatccaccaggttgcgtatgtactgaagcggaaaccacgttccgggtcaaacttctctaccgcgcggatcagccccaggttgccctcttcgataaggtccagcaacgccagaccacgattgccataacggcgggcaatttttaccaccagacgcaagttactctcgatcatccggcggcgagaggcgacatctccacgcagtgcgcgacgcgcaaaataaacttcttcttcggccgttaacagtggactataaccaatctcaccaaggtaaagctgagtcgcgtccaacacacgctgtgtggctccctggcttaacagttcctcttcggccaaatcgttatcactgggttcctgttctactaaggccttttcgtcaaaaacctcaactccgttctcatcaaattccgcatcttcatttaaatcatgaactttcagcgtattctgactcataaggtggctcctacccgtgatcccttgacggaacattcaagcaaaagcctggttccgccgatttatcgctgcggcaaataacgcagcgggtttacggatttccccttgtaacgaatttcaaaatgcaagcgtgtactactggttccggtgctacccatggtcgctattttttgccccgccttaacttcttgttgttcccggaccagcattgtgtcgttatgggcgtaggcactcaggtaatcatcattatgtttgatgataatcagattaccgtagccgcgcagcgcgttaccagcataaacaacgcggccatctgcggtcgcgataattgcctgtcctttgctgcctgcgatatcaatccccttgttgcccccctcagaagcgccaaaggtttcgatcactttgccctcagtcggccagcgccaggtggagataggcgtactggtacttgtactgctgacagtcggctcggttgtgcttgctgttggtaccgttacaggcgctgtgaccgtggtcgcagttggcttgttgttcggcaacattttgttagcactctgttcaccgctagactcagaatacgtaattgtcggttggctcgcaacagcaacggtggaattttgtgcaggcttgatcacaactccttgctctgctgcgtcggcctgggtaatggcatttccgccagtgattggcgtaccggaagcattacccacctgcaaggtctgaccaacgttcagcgcgtatggtgcctgaatattgttgcgctgagcaaggtcacggaaatcgttgccagtaatccaggcgatatagaaaagtgtgtcgccttttttcacggtataggtactgccgctataactgcctttcggaatgttcccatactgacggttatagacgatgcgtccgttttccatctgtaccggctgctgagctactggctgcactggctggatttgcggttgttgagtagcctgaatttgtggctgctgcaccggctgaatttgcggttgctgcgctgtagacgtcgtccccattttcggcggcggcgtaatcaacataccagaattagtatttgcaggcgcattgccattaacggagctgaccggtgccggtggattactagtgtcagaacagcctgccagccataggctaaccagactcaaagccgcaatgcggcgaacggtgaattttgggcttcccgcgctcatttatcccccaggaaaaattggttaataaccagtgacataattaccgtgcaaggcaccctactgaacactggaaaagatgttcacgatacgctgacctgcggcaaaataaccaggaaaaatccaggtatttcctcacgttttaagccagctcacccttcactaaagggacaaagcgcacggcctccacggtatcgataataaattcgcctccccgacgacgcacccgtttcaaatactggtgctcctcccctacgggtaagacgagaatcccgccttcgtccagctgcgtcattagcgcagttggaatttccggcggtgccgccgtaacaatgatagcgtcaaacggcgcacgtgcctgccaaccttgccatccatcgccatgacgggtactaacattatgtaaatcaagatttttcaggcggcgacgtgcctgccactgcaagcctttaatccgttcaacgctgcaaacatgctggacaagatgcgccaggattgccgtttgatatccgctaccggtgccaatttccagcacccggctctgcggcgtcagctcgagtaattcggtcattcgcgccaccatatatggctggctaattgtctgcccctgacctatcggcaaagcgatattgtcccaggctttttgttcaaacgcttcatcaacgaatttttcacgcggcacggcggcaagtgcattcagcacctgctcatcctgaataccttgcgcacgtaattgatccagaagtgcttgtacgcgtctgcttaccattgcgtgccaactcccacgctgtttaaccagtcactaaccacatcttgcgcgctatgcgcagttaaatccacatgcagcggcgtgatggagacatagccctcatctaccgcagcaaaatcggtccccggaccagcatcacatttaccgcccggcgggccaatccagtacagcgtattgccgcgcggatcttgctgcgggatcacctgatctgccggatgtcgtgtaccgcagcgcgtcacgcgaatacctttgatttgatccaagggtaaatccggaacgttaatattaagaatacgcccggtgcgcagcggctctttacacagtgcgcgcaaaatactacaggttaccgccgcggcagtgtcgtaatgtttatgcccgtcaaggctgacggcaagcgccggaaaacctaaatgacggccttccatcgcggcggctaccgtaccggaataaataacatcatcccccagattcggcccggcgttaattccggacacaacaatgtccgggcgcggacgcatcagagcattcacgccaagatagacgcaatcggtcggggttcccatttgcacagcaatatcaccattttcaaaggtaaacgtgcgcagggaggattccagtgtcagagaattactagcgccgctgcggttacgatcgggggcgaccacctgaacgtcagcaaactcacgcaaggctttcgccagcgtttgtataccgggtgcatgtaccccgtcatcattactcagcaatatgcgcataatcacctgttgtgttgataagttccctgacaacgctggttgcaaaactacccgccggaagccagaaacggatctctacggtgacgtcatcccaccaattccagcttaattgttgcggatacagcagcatcgctctgcgcgcggcttcaactttttcgcgcaccagtaaagcttgtaattcagtttctgcggcgacagctgcttgttcgaatgccagcgcttcacgctgagttccccattcgccactgcctggcaatgcggcggttatcatcaactctttatcgttgacgcgacgctgtaattccgccagttcttcggtggttgcgacaaaccagctaccacgtccggctaattgtagcgcatcgccgtcaacaacttgattaacgtctgcttttttgaggcgctcagcaacaatctgattaaacaacgcactgcgggctgcgctcaaccaaaaactccgtttattgcgatcgcgcaccggagtattggtttgcgcccagcgctgcgccccctgcaagttgctaccgccaatcccaaaacgttgggcaccgaagtagttcggtacaccttttacgcaaatatcgatcagacgttgttcaacgtcatcgcgattgctcacttcgcgcagaaccagggtaaaggcgttacctttcagcgcgcctaaacgcagcttgcgcttgtgccgcgcatactccagcacctggcagccttccagttgaaaggcgctcagatcgggcatttccttgcccggcacgcgagcgcataaccactgttccgtaacagcatgtttgtctttttgcccagcgaagctgacttcacgggcatgaattttcaggaatttcgccagtgcatccgccacaaaacgggtattgcagccgtttttgaggattctaaccagaatatgctcaccttcaccatcaggctcaaagcccaaatcttccaccaccacaaagtcttccggattggctttcagcagcccggtgccttgcggtttaccgtggaggtaagtgagattatcaaactcaatcattttgttgccttaatgagtagcgccaccgcttcacaggcaatcccttccccacgtccggtaaatcccagtttttccgtagtagtggctttcacgttaacatcatccatatggcagccgagatcttcggcaataaacacgcgcatttgtggaatgtgcggcaacatcttcggtgcctgagcgatgatagtgacatcgacgttgccaagggtataacccttcgcctgaatacgacgccaggcttcgcgtagcagctcgcggctatcggcacctttaaatgccggatcggtatccgggaacagcttgccgatatcccccagcgccgccgcgccaagcaatgcatcggtcaacgcatggagcgccacgtcgccatcagaatgcgccagcaatcctttttcgtaaggaatgcgtacgccaccaatgataattgggccttcaccgccaaaggcatgtacgtcaaaaccgtgtccaattcgcattatgtattctcctgatggatggttcgggtgaggtaaaactcggccagtgccaaatcttccgggcgcgtgactttaatgttatccgcacggccttcgaccaactgaggatggaatccgcaatattccagcgcgctggcttcgtcggtaatagtcgcgccttcatttagagcgcgcgtcagacagtcatgtaacagctcacgagggaaaaattgcggcgtcagcgcgtgccataagccgttgcgatcaacggtatgagcaatggcatttttgcccggttcggcacgtttcatagtatcgcgcactggtgcggcgaggatcccccccgtgcggctggtttcgctcaacgccaacaatcgcgcgaggtcatcctgatgcaaacaaggacgagcggcgtcatgcaccaatacccactgcgcgtcgccagcggctttcagacctgccagcacggaatcggcacgctcatcaccgccatctacaacggtgatttgcggatgattcgccagaggaagttgtgcaaaacggctatcgccaggacttatggcaatgacgacacgtttcacccggggatgcgccagcagcgcatgcacgctgtgttcaagaatggtttgattaccgatactgagatattgcttaggacattccgtttgcattcgacggccaaatccggccgccggaaccacggcgcaaacatccaaatgagtggttgccatgttaattcccgggctgatttatcgattgttttgccccgcagactgtgcgcgcttgctcgcgtcaggcaccagacgataaaaagtttcgcccggcctggtcatgctgagttcattacgcgcacgctcttcgagcgcctcctggccgccattgagatcgtcaatttcggcaaaaagttgatcgtttcgcgctttaagtttcgcgtttgtagcttgctgtgccgccacatcatcattgacgcgggtatagtcatgtataccgttcttaccgaaccacaggctatactgtagccagaccagaatagccagcaacagcagcgttagtttacccatcctgccccctgaaaaacggcatcatcatcccatgcatccgaagacgactctacatcctctgttggggataccgcgacaacgcgggcaaatgtaccacatttgtccattgttacgtatacccagggcgtgcagaacataatctcattattagttacggtttgaattatgaacagaggagacgggaaagtacaaattagcccagtagccacataaacagtgcgccaaacataatgcctactgtcaccagggtgaaaacaatactgtagcgtagctttccgtccatcaaactatgcagcgcaatccccaccactaccgcgacgggcatcagcgccagaaagaaaggccaggtgtagataaagaagaacagcgtgttagagccataaatcaacatcggcatcgccagcgcaaataaccaggagataaaaccgaccacggcaccaggcagactccatgtggtttcttcatcctcagtaaggctgtcgttatttgttagtgtaatgttatggctattacgcatatttgatcctgttactttgacgaaccgggcatggaaacccggtggtgtctcaggatctgataatatcgttctgtctcaacagatctaataattgctgtaccaaatttgttactaattgttcaccattgagatgaatttctgcgctttcaggcgcttcgtaaacggaatctattcccgtaaagttgcgcagttcaccggcacgcgctttcttatataagcctttgggatcgcgggcttcgcaaatcgccagcggcgtatcgacaaacacttcgataaagcgcccttctcctacgcgttcgcgaaccatctggcgttcggcgcggtgtgggctgataaatgcggtcagcaccaccagtccggcttcaaccatcaaattcgccacttcaccgacgcgacggatattctctttacgatcggcatcgctaaaaccgagatcgctgcataatccgtggcgaacattgtcgccatccagcagatacgtactgacgccgagtttatgtaacgcctcctccagcgccccggcgaccgtacttttaccggacccggagaggccggtaaaccacagcactacaccacgatgaccgtggtgtagctcgcgttgttgcacagtgaccggatggctatgccagacgacgttttcgtcatgcagcgccattatttatcccccagcaaatcgcgcgcgccccagtgcggaaagtggcgacgaaccagagcattcaattccagttcgaatgcactgaattcagatggcgcagcagttgcctggctaactggctcgtgcaccataccggcacccacggtcacattgctcaggcgatcgataaaaatcagcccacccgtcaccggattttgttgataacgatctaacaccagcggctcgtcaaaagtgagatccacgaggccgatcccattcagtggcaggttttcaacttcacgctgggtaaggttattaatatcaacctgatagcgaatgccatcaacacgcgcgcgcgtcttcttaccggcaattttgatgtcgtaactctgccctggagaaagcggctgttccgccatccataccacatccacgctcgcgctctgcaccgccggtaacgcttcgtctgccgccagcagcagatcgccacggctgatgtcgatctcatccgtcagcaccagggtgatcgcttctccggcaaaggcttcttcgcgatcaccatcaaaagtcacgatccgcgcgacgttactttccacaccagagggcagcactttgacacgttgcccgacttccacgcgaccggatgccagcgttccggcgtaaccacgaaaatcgagattcgggcgattaacgtactgcaccgggaagcgcattggctgagcatccaccactcgctggatctccacggtttccagcacttcgagcagtgtcggaccgctgtaccacggcatactttcactttggcttgccacgttgtcgccttccagtgcagagagcggcacaaagcggatatccagattacccggcagctgcccggcaaaggtcaaataatcttcacgaatacgggtgaacgtctcttcactgtaatccaccagatccattttgttgatcgccacgaccagatgtttgatccccaacagtgtggagataaaactgtgacgacgggtttgatcgagcacgcctttacgggcatcgatcagtaagatcgccagttcacatgtgcttgcgccagtcgccatattgcgggtgtactgctcgtgccctggggtgtcggcgataataaatttacgcttctcggtagagaaatagcggtaggccacgtcaatggtgatgccctgttcgcgctcagcttgcaggccgtccaccagcagagccagatccagcttttcgccctgggtgccgtgacgcttactgtcgttatgcaggctactgagctgatcttcgtagatttggcgggtatcgtgcagcagacgaccaatcagagtacttttgccgtcatcgacgctaccacaggtcagaaaacgcagcaggcttttatgttgttgcgcaatcatccaggcttcgacgccgccttcattggcgatttgttgtgcaagtgcggtgttcatcttaaaaatacccctgacgttttttcagctccatagaccccgcctggtcgcggtcaatcacgcggccctgacgttcactggtggtggaaaccagcatctcttcgatgatttccggcagtgtttgtgcattactctccaccgcaccggtcagcggccagcagcccagcgtacggaaacgcaccatccgttttttaatcacttcgcccggttgcaggtcgatacggttgtcatcaatcatcatcaacataccgtcgcgttccagaaccggacgttccgcagcgagatatagcggaacaatgtcgatattttccagccagatgtattgccagatatcctgctcggtccagttagagagcgggaagacgcggatgctttcgcctttgttaatttgcccgttgtagttgtgccacagctccgggcgctgatttttcggatcccagcgatggaagcggtcacggaaagagtaaattcgctctttagcgcgggatttctcttcgtcacggcgcgcaccaccgaaggcggcatcaaaaccgtatttgttcagcgcctgtttcaggccttcagttttcataatatcggtatgtttcgcgctgccgtgcacgaatggattaatccccatcgccacgccttccgggtttttatgcaccagcagttcgcagccgtaggctttagcagtacgatcgcggaactcatacatctcgcggaatttccagccggtatcgacatgcagcaacgggaaaggcagcgtacctggataaaacgccttgcgcgccagatgcagcatgacgctggaatctttaccgatagagtagagcatcaccggattactgaattctgccgccacctcgcgaataatgtggatgctttccgcctccagttgccgcaggtgagtaagtcgtatttgatccataaccgttcctttgcaataccgctattttcttgccatcagatgtttcgactatagggagcgtaagagaacgaatgaaattaccaattagaatgagtagttccttaacggaataacgatttggcaaagctaatatcaaaaagtgcttaaggcaccggatttcgggcgtttaggaagatttgaaattgttttagcgcagcggcagtttcatactatggcggtaaaaaaatttgcatggtatttaaggactcactatgttttccgcattgcgccaccgtaccgctgccctggcgctcggcgtatgctttattctccccgtacacgccagcagtcctaaacctggcgattttgctaatactcaggcacgacatattgctactttctttccgggacgcatgaccggaactcctgcagaaatgttatctgccgattatattcgccaacagtttcagcaaatgggttatcgcagtgatattcggacatttaatagtcggtatatttataccgcccgcgataatcgtaagagctggcataacgtgacgggaagtacggtgattgccgctcatgaaggcaaagcgccgcagcagatcatcattatggcgcatctggatacttacgccccgctgagcgatgctgacgccgatgccaatctcggcgggctgacgttacaaggaatggatgataacgccgcaggtttaggtgtcatgctggaattggcagaacgcctgaaaaatacgcctaccgagtatggtattcgatttgtggcgaccagcggcgaagaggaagggaaattaggcgctgagaatttactcaagcggatgagtgacaccgaaaagaaaaatacgctgctggtgattaatctcgataacttaattgttggcgataaattgtatttcaacagcggtgtaaaaacccctgaggcagtaaggaaattaacgcgcgacagggcgctggcaattgcgcgcagtcacggaatagccgcaacgaccaatccgggtttgaataaaaattatccgaaaggcactgggtgttgtaatgacgcagaaatattcgacaaagcgggcattgctgtacttagcgtggaagcgactaactggaatcttgggaataaggatggttatcagcaacgcgcaaaaacacctgccttcccggcgggaaatagctggcatgacgtaagactggataatcaccaacatattgataaggctcttcctggaagaatagaacgtcgctgccgtgacgttatgcggataatgctacctctggtgaaggagttggcgaaggcgtcttgatgggtttgaaaatgggagctgggagttctaccgcagaggcgggggaactccaagtgatatccatcatcgcatccagtgcgcccggtttatccccgctgatgcggggaacaccagcgtcaggcgtgaaatctcaccgtcgttgccggtttatccctgctggcgcggggaactctcggttcaggcgttgcaaacctggctaccgggcggtttatccccgctaacgcggggaactcgtagtccatcattccacctatgtctgaactcccggtttatccccgctggcgcggggaactcccgggggataatgtttacggtcatgcgccccccggtttatccccgctggcgcggggaactctgggcggcttgccttgcagccagctccagcagcggtttatccccgctggcgcggggaactcaagctggctggcaatctctttcggggtgagtccggtttatccccgctggcgcggggaactctagtttccgtatctccggatttataaagctgacggtttatccccgctggcgcggggaactcgcaggcggcgacgcgcagggtatgcgcgattcgcggtttatccccgctggcgcggggaactcgcgaccgctcagaaattccagacccgatccaaacggtttatccccgctggcgcggggaactctcaacattatcaattacaaccgacagggagcccggtttatccccgctggcgcggggaactcagcgtgttcggcatcacctttggcttcggctgcggtttatccccgctggcgcggggaactctgcgtgagcgtatcgccgcgcgtctgcgaaagcggtttatccccgctggcgcggggaactctctaaaagtatacatttgttcttaaagcattttttcccataaaaacaacccaccaaccttaatgtaacatttccttattattaaagatcagctaattctttgttttcaaacaggtaaaaaagacaccaaccttaaaccatccaaatctaccggggtacgcctgtttaacccaaatgtctggaactcaaatcccgtttccgtattcgttgcccatgccatcactacattgccttcttccgccagtccagctatttgttcccagatcatttcacgaatttttgcggatacatcacctacatatacccctgcacgtacctccaacaaccagatggctaatctgcctcgtaagcgcggaggtacattttcagtgaccacgaccaacatactcatttcagctactccgatggcctgcatctcccagactaacaggaagcggaatggcaacaggctgtgcatcttcaggtggggccggcggttgtatttctccagcggcaagcacgtcctctataagcggaatcaatttggctaatgttttactactgcgaaaaatatccctgcacgccaaacggacttcccggtccggctcaccagggttacgacgcgctatctcaaaagctttcggtacaacagtgtcaaatttaatgatgtctgcaatatcgtaaacaaaggaaagaggctttcctgtatgcacaaacccaatagctggtgcataaccagctgcaagtatcgccgcttcagttacgccgtataaacaggaagttgcagcgctaatgcattggttgatcgtatcgcccttttcccagtctttcggatcgtagcgacgtccattccatgtcacgccgtattgcttcgccagaagtgcgtaggttgcccgcacgcgactgccttctatacctctgagttgctctacggagcgccgggcaggcgcaggttctccaaaccgaagttcaaacattttacgtacgaccttcagacgcaaatcttcatccagagcaagttttgcctgatagagcagcttatcactacgcgcacctccaggctgaccagaagcataaacacgaacgcccgcttcccccacccataccaacaatgttccaacttgcgcagccaggcgtacagctgcatggctaacccgtgtaccaggttccagcatgatgcaggcaacgctgccaacaggaatatgagtgcggatccctgtcttgtcgataagtacaaacgcgccatctattacatcgatctgcccatattgcagaaagatcatggagacgcgatctttgagtggaatgggattaaggggaagccaggtcattttattacacctcaatcacagtggagccaaagatagcaagccacatcccatgcttttagctggcccaataccttgctgtacaagatctattaacgctggcgcgtcgttgatggtgagcacaccttcaaagcaaaccgtttggatctttccacttttaccatcaccagaaaaatactgtggccgttcgcttatgggatgcacatcttcaacgcgcgccgcattgcccaatttacgttgcaaccacgcgatttgttctgcttcttttattaacggaacccgacagcgtttaatattccctttactgtccaggcgcttttgattgtcgagaatagttttgatcggatttgcccgaagccgaaaatagagtggaacaccaacctgaagttgaaattcaacctgtttagttttaatgactgtcgcaacggcagtactaacaggcatttgcgcactctgcaataaaacatgacagccttctggtgtgtttcgcttctcaacatgaaaaagaaaatcacgagcagcatccggtctgtttggaaataaatgccataatccctggtgaagttggtaaagatccctgctccaggccctggcaatgatgactttactgagatacatccatacctcctttaatcacataccattctcgggaagcaaattgtcgaggcaaggtgatcatcggttcgtcgcgcgccgtaaattttaaatgatgccctgtaacactttcctcactatatatatcgccgccaacgggctcataatttaatagcgccttctgaggatcgcttgcctgacatgtccccaaaaaaagcgggtgtgttagtgggcaacttctccgccccaggtaaggtgtataccgaggctttaatactgctttttcaagttcactgataaccatcgttgcatggggtgttaaccagagagcgacggtaaaggaggcatcacataaatattcgcgccatgtttgaatcgtttcatgacttttcaaaccacggtaatcttctcgcgctccaaggactgtatggtaatcacgcaaccccgttacagacacacgacgatcgtcaagaatgagttcatcgcagcgcactgcaaattgcacactctcacttaacgcctgtaaactagaagtatcatcacgttggatcccaagacaagccccgagtagccctaataacccgcttcgggtcggaaatcttccggtaggtcgcgttccttcaaaggtcggctgcccccaggcttgcattggcccagcaagccgcaagatcaaataagatctcatgttcacgcctcgccattattacgaacccaggattttaactgttctaaagtaggcatttgtttaacttgagcagtaattgggtctacatcagataagctgaattgcgcagcagctccgttcagaccatatccattggcaacgcgatcccaatattgattaaacgcctgtatagacggttgcaaaaagccatctttcgctttaaccgctttttcaaaagcatttgccatagaaagtggcatatcggagaaattaaccattaccatatccgcagggttaaaagcggcataagtacgctgttttgctccagggacctctgttgccagcatatgaacaacatgggttgcaatttccagagcctgctccctggaggcaccacctaaattttcctgaagttgagcgaggttaatgttggcataacgataaaaaacaccgctactaaattcctgagttcccagatgtgcagaaccttgttcctgtaaatcatctacagcggtgaaccagtcaatatcagaatcaacctgatgagtagtgatcgcatgcgcaatggacattgcaccatcaacttttcccaactcagtcatcatgccgctggttgccattcttccactaagcgcaatatcaacaccctgctgtaaattcacacgtatggcggcaatatcttccttaagaactttgagcagctttttatcatccagattatcagcctctgcttttgcaacctgctcacagaaccaggctatttctcccacaacccagggagtaaccgcatcggcagaaatcttttcggcttcatcaacacttttaccggagagcagcgctaatgtcttatcgatgattttttggtcaaaacgttcaccaagtttttgccgaagaacatcacgtaattgtgcaagatgaatggttctgagactggattcaccaatattttgtgcgtaataaccacttttacgcatcgcacgtttaaggctttgactactaattcttactcgtcttttgccgccgaaaatagcgtctttctgcatgttcatatcgtcgcggttcagacaactagggctgtgagagatcagaacatgaatattgataaagttagacatagaaaggtttccttacgcatttttgtttgtggtcaatacaaaatcttccagaagttgctggcgttcgcgctttccccaccaggtcaacatcctggccattaatggccagtcaagtacgggttcggcgtgagtaagtaatcgacgtaactggaccatatcggctgttctgtcagcccgaattaattgaaagatacggcgctcgttaattcttccactattggctaaagctcttcccaagctgatacctgttgtttgctcgctttttttgtcctgatgtcggatgacattctttcctgcgctcaggcaaaacaccatgcgcaaaagagcctgctggtgacgtgggttttcccaaccaaaaggttgcaccagcctataaaacgcagggatatcgcgtaattcatcaggttcactaacacgtctaatttgcgcacaacttccattatccagttgttgccaggctcgatataaagccattgcatcaatttcatcagccattacttggccctccttgcggttttaactcccgtaaatgtttgtatagcgtggcgcgggcaagcgctaatgtgcttattaatttaggatgatgtgcatagggagctacagattgattaaatagcatttcacacaattgatgaagtttgtctcgtaaatcagctattacctcatcagcctgggaaaaattaacattcgccagtacatcgggaattaataattcactctgtcgatagaaatgcctttctgcagtctcatgaacagagactccggcccctttgaagtctttatttttaaacccttctgcaaaggtatataacgccttgcgtaaggctgttttatatcccaaaccaacagtcactatttcgtttatcacattgccgtattgttgccacccctgattaaacatcaacacatcatgacgccgttcaagaatagatgcttgattattacgatatccccccataatcaattcaagaggactttgcggcgcaatatttctgaattgattcacaaccgccgccacgcgatttccattttcattttgaataatcttatctaccacaactcggctgatttgtgtccaacttggtgcggaggtggtgaaagcaagaaatttttcctcaacctcccctttcttgactgttaccagacaaggggaatgcggatggggccatagcccattaactgtaaaggtaaatttttccttaagaaaaccggtataacgcaaattgctttcctgtccacagcaagaacatttaccaatcccaatgggatcgcataattcaatatgcgctggttgccagaatagaccacggacaaacccaatactgctagcaggtatagactcattggacttgataggtttaatccaggtaggttggttttccgtatgactttcattaggaaattgtttttgaagacgaggtaatgtgaggacattgagtaacaccgtactacgaagatcgatcccacgtacgaacgttgttacaggtgttcctccacgtaaaccgcttttaaaaccaccaccaaaacctggtgcctgattcgcctggttgaataacgcaatcgcagtgcatccaccacataatgcttcaccctgccccggttgattgacaaatgcacaattcgtcgcgccgcttaccccagccaacagtttttccattggagtcacatcatttgctttgacacctttggtctgcataaagggatgttctgcgtgattaaggtagaacatatctatccacggcgcgatgagttgttgaaactcatcttcagtgagcggattcattatgcgatgtcgaaattcaacgtcatcttttgccggggcgataatttgcccaatgcaaaccagcagtgctaaagcggccagttccatatcgtcacggggcaaacttaatcgccactgatctctactgcagtataggctttgcagatttatgatttggactttccccccgtttcgcgggcgtacagggatccagttatcaataagcaaattcatttgttctccttcatatgctccgacatttctcctgcatttctatacgtcggcacacttccgttatcggtaaaaacaaagaaaaaatacggcgtaattaattcaataatcacattcactgcaaaaatatattcattggtttaatacaattaacctatacatatattaagatgtgttgaattgtttaaagacaataatgcatgcatttcaaatctgcaagttattcgttttattattaaagaaacttttagttataataattaccatgaattttattacataaaatattcatactgtgaatataaaatctcataccgggaaattaaaagaagatgtacattgtgcaccttccctacttaagtagggataaaccgttattggtcttattatcgtcattgataacaatcattcccgaagttatttgggatttgcagggatgactctggtcatcccttcatcccctgtataggtaataacaatactgttaccctgccagacccatccatccagattctgtttcccttccagccaaagtaacccatcttcatctactacttcagaaaaactacgtttccaggtgaagggtacattgacgcgattaagtgcaagcgcctcatactgctgttcatgacttaggtcctcgtagacctggccatcgagcagttgtttaccactagacgtttgtacataaggcaataatggcaggctcatttccccatccctcgttaccgcaagaatggtttcatcgttatcctgcaagctatattcttcagcccactgcaggaccttgcgagccttgaaccttttttcacactcggcgctttcaaatttatccatgccattgccgacccattctggctcatccatttccgcatcatcgtaaatgctatccagccattgccggtaagcatcagggaaaaataaggatgctccattaagctcctcaatatgttgctgcgtccgccacatgactctaacgttgctataaatatgctcatgtcgtccgtaaccctcgccatcaggcagcaaaatggtggcaacaggaatctcaaaaccagcgggacgatatttgcgatgatggcgatgtaaacggcccaatcgttggaaaagcaaatctgcaggacaatgctgagtaattaaccaatcaaaatcaacgtcgagactttgttccacgacctgggttgcgacaagtatccgtccaacatttcgcttcccatttttgccgaaattgctaataactcgattctctttttcacgacgatcgttcagcgtaaagcgcgcatgaaacaaatctatatctacttgcgtgttatttagctcctttagccgttggtagcatacttgtgcaacgtcaaccaaattgcaaataagacagacctgtgcacccgcgtttgccgctgcgatcattcgctctaacatcgtaaggtcaggtaacatgtcagctaaacaaataggttctggctgaatgctaaagcggggcgggagttgttctggatgagctagcagatcaaaacgttgcgcaccattcacacctcgccagttaatgagtggatatgcggagttattttccactggatctgtatgcagaccataagtatccagaagtttctgtttttgtttcattggtagggttgcggaaagaagaataacactccctcccacatcagcctgagccttgagcactgcctccagcaagccgttcatataggtgtcgtaagcatgaacttcatcaacaattaaaacacttcgaccaattcccaaaccacggataaagcggtgtttaactggcaatacgcttatcaacacctgatcaatcgtgcaaacgccgatttgcccaagaaacactttcttattgctttgactcaaccactgacaacactgaacccacgcttcttcttgcccctgttcagtaatcgcgcgactttttatactttgaaagaggtggttaaaccgactattgccatgagcaagaataagatttggggaactaaataagtggctcgcgctcgcttccattctcgtaagcatagcattcgcggtagcttgtgttgggagggcaaaaataacactatccgcaatttgttgatcaataagtttccaagcataggccagcgctgtttccgttttaccggagcctgtaggtgcctctattaccgtcagcccgggagctactggaagagcatcaactaacacctgtaattgtctgggttgatagccattgtccagtagtgcatgaacaccttcataacatcgcttattacttacaagtccactcaactccaatacccggctcgcatcctgctgtcggtcctggaaatacgttctcagagcatttatgtcggaaggcgcatcctcattaaacagaaaggtattcgttgtagtccaggagcctaaccagtcagcaaggctgcaaaaacctgctaacagactactacaatcaggtggtatatcgtttatagataaccccgctggcgttaaaaataatgcttccagtacagatatccactcctcacgagcctgtttatcttgcgcagcataagatgccagagaagctggcatttcccaacggctcttatcttgatcctgggaatgtaatataaaaccatgatgtcctgtaacggcctctacccatggaaaccaggactcataaggatgaggagcggcatcaaaaaaactgaaaaaatccccgagagattgctcactaagactatcctggttaaaccaatacagaccggctgcaccatgattaaatttacggcacatttgtgtacttggaccattaagacttggcgttgcaggatttaatttcagccaactttctgcacttttatattggaatcgtatatcaaactttccaatatcatgaagagcaatgaaaaataacagccaggccttcaccctctgtttacttagcatttcatttcggcaaaaagtattttgcagtacgacactttgatcccaccagcaatctgcaacagcagcaacatcaaggcaatgataaattaacagatgaatatcatttcctttcgtcaagcttttactggattttccccagtaatggcatatatatttaaaaggttccattaatagcctccctgtttttttagtattatcgatgatatcagcgggctatttttcgatgctgctcataaatatcgaattacagtgatatacacatgtcttgcctccctgcaaagaagagactaacattcgaattgtttgggttcgaacgctggcctcaggttgatagaaatatcgcctggggcttttgtccatctggaacctcgcgaatgcttaacgccagacagcctcaagcacccgacgccattctatacctgataattcttcccgcggcgttcacgtttaaaatcaggaatgctgctcgcaaaataaaaacgcccccatcatttctgacagaggcgtttaatttgtccggcaatatttacccttcgtgtaacccacattccctttttaagccaaagaaacgcgtttcttcttccgccatgccgggttcccatttacgggttgtatgggtatcgcccacgcttaaatatccttcatcccataatgggtgatatttcaggccatgtttttgcaggtactgataaatagttcggttatcccagtcgataatcggcagcactttaaatacgccacgctgaattgccagcaccggtaaattggcacgactgccggattgttcacggcgcaggccagcaaaccaggtttgcgcattcagttctttcagagcccggttcatcggttcgactttgttgatgtcattgtacttttcaatgccttcaacgccctgctcccacagttttccgtagcgtgcttcctgccaggctgcgctttcggtagcacggtacactttcaggttgagcttgagtttgtccgttaactcgtcaataaagcggtaggtttccgggaacaagtaacccgtatcggtgaggatcaccggaatatccgggcgaatttgattcaccagatgcaggctcaccgccgcctgaatgccaaagctggaagaaagtacatattcaccgggcagattatccagcgcccaggctacgcggccttcagcgtccagtttttccagttcggcgttagtttccgccagcgccagaatgcgatctaccttcggcagttcgttcagggcgtttagatcgagtttggacatagattcctcactgtttgccttgcctgatgcgacgctcacgcgttcttatcaggcctacaagaccgggctgatggttaatcccacaaatcacgcgccggatcgagcaccgggcgaatgatgcccgcacgcaccgtaaagtcgccgaagccttcacccgcttcgcgctctttcgcccagcgccctatcagttcatcaaggctcgccaggatttccggctcggtgatgttttctttatacatccgtgggatacgtgtcccaatgcggttgccgccaagatgcaggttgtagcgacccggcgctttacccaccaggcccacttccgccagcatcgcgcgaccacaaccgttcgggcagcctgttacacgcatcacgatatgctcatcgctgacaccatgtttcgccattaaattatcgatgttgtcgataaaagacggcaggaaacgctctgcttccgccatcgccagcgggcaagtcgggaaactcacgcaagccatgctgttttcacgctgcggcgtgacggcattcattaacccgctctctttggcgatcttctcgatcttcgctttctcgctttccggtacaccggcgatgatcagattctggttcgccgtaatgcggaaatcgcctttgtggatcttcgcgatctccagcaggccggttttcagcggacgcgccggataatcaaggatgcgaccattttcgataaacagcgtcaggtgccagttatcatcaatgcccttaacccagccaatacgatcgcctcgtccggtgaactcatatggacggatcggttcaaatttgatccccgcgcgacgctccacttccgctttaaacgtctcaacccccacgcgctccagcgtgtatttggttttggcatttttacgatcggttcggttaccccagtcacgctgagttgtcacgacggcttcggccaccgccagcgtatgctccagcggcagatagccaaactcactcgcggtgcgggcgtaggttttcttgttgccgtgttcgatggaaagcccaccgcccaccaacaggttaaagcccaccagcttgccgttttcggcgatcgccacgaagttcatgtcgttggcgtgcagatcgatatcgttctgtggcgggatcactaccgtggttttgaatttacgcggcaggtaggtctggccgaggatcggttcttcatcagtagtggcgactttttcctggtcgagccagatctccgcatacgcgcgggtacgaggcaacagatgctcagaaatcttcttcgcccactcgtacgcttccgcgtgcagctggctctcgtaagggttgctggtgcagagtacgttacggttcatgtcgttagctgtcgccagcgcatcaagaccgacgctgtgcagcatctggtgcaccggtttgacgttctttttcagaatgccgtggaactgaaacgtctggcggttggtcaggcgaatgctgccatagatggtgttttcaccggcaaatttgtcgatcgcctgccactgtttagtggtaatcaccccacccggcagacgacagcgaagcagcatcgcgtggcgcggctccagcttctgttcagcacgttcggcgcggatgtcgcggtcatcctgctgatacatgccgtggaagcgaatcagcaggaagttgtcgcccttaaagccgccggtcagaccgtcgtttaaatcttccgcaatggtgccgcgcaggtagttgctttcatgcttcatgcgctcggcgtctgtcagttttccttcgaccactaaaggccctggatgtttttcgctcattagtagacatctcgctgataacggcgctctacgcgcagctcacttaaaaattcatccgccgcttcggtgtccatgccaccaaattcggcaatcacttccagaagtgcctgctcaacgtctttcgccatgcgattagcgtcgccgcagacataaatgtgggcaccatcattgatccagcgccacagctccgcgccctgttcgcgcagtttgtcttgtacgtaaactttttctttttgatcgcggctccaggcaagatcgatacgtgtcagcacgccatctttgacgtagcgctgccactccacctggtacaggaagtcttccgtaaagtgcggattaccaaagaacagccagtttttacctggcgcttcgtcggcggcgcgttgctgcataaaggcgcggaacggcgcaataccggtgcctgggccaatcataatcaccggggtttctggattggctggcaggcggaagttatcgttatgttcgataaatacgcggacttcgccctcttcttccacgcggtcagcgaggaagctggaggcaccaccggcacgggcgcggccttccacgtcgtaacgcaccacaccaacggtgacgtgtacttcgttctcgacttccgcctggctggaggcgatggaatacagacgcggcgtcagcgggcgcagcagattaattagcgcttcggcatcaagctgtgccggggagaaacgcaccatgtcaacaatcggcgtcgtcgcggcgtaatgctgtaacttcgctttatcgcccaccagcggcagcagtgtttcactgcgggtaagcgtggcgtaattctcaacaatgttggcggtgttgacggtcagttcgaagtgccactgtagcgcttcgttcagaggcaacgttttgccctcgacggtgacaggttcatcgcctttcagccacagcagttcgacaagttctttcaccagtgccggatcgttctgataccagacgcccagcgcgtcacccggctggtaacgcatgccgctgtcacctaagtcaatttcgatatggcgaacgtctttttcagagttacgcccggtaattttctggttaacagagaggctagccaccagcggcgcgtctttgctgtacgggctggtgtggatttcatttaccgcgccagtagcgacggattggctaggtgccgcgacaggcgcacggcttttaagcgcatcaaccacgcgggcgcgccactcgctggcagcagcctggtattcaacatcggcatcgacacggtcgagcaggcgttcaccacccagttccgccagcttgctgtcgaaatctttcccggactggcagaaaaattcataagagctatcgccgaggctaaacacggcaaacgcggtgttttccagctttggcgcttttttggagaacaggaacttatgcagcgcgacggcttcttccggcggttccccttccccttgcgtactcgtcactacgatgagcagtttttcgctggcgatttgtttgaatttatagtcgcccgcgttcaccagcttaacgttcagttttgctgctaataaatcatcacgtaatgcttcagcaacccggcgcgcattgccggtttggctggcggagataatagttatacccggcatttctgcggctggcgctggcgtcgctgcaagcgcagcaggctgctgattgagtacgccccagaaatagccagaaacccaggcaagctgggtgggagttaaatcggtcgtggccgcctgaaggcgtgccagttgctccgggttcaacggaagcaacgcggaaggtgggacctgtgtcgtcatgcgtcgttatgttccagtaagcaaagctgtttctgcgccctgtcagcgcccataaaacagaagagaaggtaaggttaacggggcaaacggtgtggattaaagacgggatagcgataactaataaccaaatcgactaacctgttttagcaatagtctttaacaacaaaatagattaaccaacctaatgaaaaacaaatgaatttagccaatcattaagataaatcagcgattttgcgcaacaaagtcgttttagataatgcgaaaaaacagcctttccggtactctacggcggttttatcgtcctgtagagaaattatgatgtccaccacgttatttaaagatttcaccttcgaagccgctcaccgcttaccacacgtcccggaagggcataaatgtggtcgcctgcacgggcattcctttatggtgcgactggaaattaccggggaagtcgatccgcatacgggctggattatcgatttcgctgaactaaaagcggcgtttaaaccaacctacgagcgcctcgatcaccattatctcaatgatattccaggtctggaaaacccaaccagcgaggttttagcaaaatggatttgggatcaggttaaacccgttgtgccgctgttaagtgcggtgatggtaaaagaaacctgcaccgcaggttgtatctatcgcggcgaatgataagagtgtgtcggcggtcaatttcccttaagtaacgctatgttagggtgttgtgttctggatatctggggcatgacatggaagacgactgcgacattattattattggtgccggtattgcaggcaccgcttgcgcgttacgctgcgcgcgagcgggtttatccgttttgttactggaacgcgctgaaatccccggcagcaaaaatctttccggcgggcggttatatacccatgcactcgcggaactcctcccgcaatttcatctgaccgcgcctcttgaacgacgcatcactcacgaaagcctttccctgttaacgcccgatggcgtaacgacgttttccagcttacagcccggcggtgaatcctggagtgtattacgtgcacgattcgatccgtggctggttgccgaagccgaaaaagaaggtgtcgaatgcatccccggagcgacggtggatgcactgtatgaagaaaacggcagagtctgtggcgttatttgtggtgacgatattctccgcgcccgttatgtggtgctggcagaaggtgccaacagcgtcctggctgaacgtcacgggttagtgactcgtcctgctggcgaagcgatggcgttggggatcaaagaagtgctgagcctggaaacatccgctattgaagaacgttttcatctggagaataacgaaggcgcagcgttgctgttcagcggcaggatctgtgatgacttacccggcggcgcatttctttatactaatcaacaaacgctcagcttagggattgtttgcccgctctcttcccttacgcaaagtcgtgttccggcaagcgagctgctgactcgctttaaagcgcatccggcagtgcgcccgcttatcaaaaacacggaaagtctggagtatggtgcgcatctggtgccagaaggtggcttgcacagtatgccggtgcaatacgccggtaacggctggctgctggtgggcgatgcgttgcgcagttgcgtcaataccggaatttccgtgcgcggcatggatatggcgctgactggcgcgcaggcggcggcacaaacgctgataagcgcctgccagcaccgcgagccgcaaaatctgtttccgctttatcatcacaacgtagagcgcagcctgctgtgggatgttctacagcgttatcagcatgttccggcgcttttgcaacgcccgggatggtaccgtacgtggcctgcgttaatgcaggatatttcccgcgatttatgggatcagggtgataaacctgttccaccgctgcgccagttattctggcatcatttacgtcgtcacggcctgtggcatctggcgggcgatgttatcaggagtctgcgatgtctgtaacgtaagatgttatcaggagtctgcgatgtctgtagcccgtaatctctggcgcgttgctgatgcgccgcacattgttccggctgactccgttgagcgccagacggcagaacggttgattaacgcctgtccggcaggtctttttagcctcacaccggaaggtaacttacgtattgactatcgcagttgcctggagtgtggcacctgccgtttgctgtgcgacgaaagtacactacaacagtggcgctatccgccttccggattcggcatcacctaccgctttggataaataataaggataatttatgcccctcttacacctgctccgccagaatccggtgattgctgccgttaaagataatgccagcctgcaactggcaatcgattctgaatgccaatttatttccgtgttgtacggcaatatctgcaccatcagtaatatcgttaaaaagattaagaacgccgggaaatatgcttttattcatgttgatttgctggaaggcgcgagtaataaagaagtcgttattcagtttttgaaactggtgaccgaggcggacggcattatcagtaccaaagccagtatgttgaaagcggcaagagcggaaggttttttctgtattcatcgcctgtttattgttgatagtattagctttcacaacattgataagcaagttgcgcaaagcaatccggattgtattgagatcctgccaggctgtatgcccaaagtgctgggctgggtgacagagaaaatccgccaaccgctgattgccggtgggctggtgtgcgatgaagaagatgcgcgtaatgcgattaacgcgggtgtcgtggcgctttccaccacgaataccggggtctggacgttagcgaaaaaattactttgacgggataatcgtaaccaattgaatttggtttgatttgtaggccgcacgccacatccgacattcagcgcctgatgcgacgcttgacgcgtcttatcaggcctacaagtccccaggccagaaccgtaggcaggatcatccggcaacacgttattggcaatctgcgtgaatgtttgtcaccagtgcctccagcaccactttccagtcatcaaccacgccaacatctgcctgactaaataccgcagcgctggcgtcatgattaatcgccaccacaaacttgctattgcgtacgcccgccattaacgctgctgcgccagaagcgccaacaacaatacacacctcaggtgccagcagatgtccggaaataccaatcactttttcagcatcaacgccaccgttcatcactcgcgcccgactgtagcccacttcggctcccagcttttctgccagcatagcgatttcctggttatctgcctctccgccctgccccaccaccagcacccgtctggcctcagctaatgggtcgcgggtaacatttttcagatcctctgtgctaaccagccagtccggaagcgcacccgggacaatgttcagttgttgcattccagagggcaacgtggcgtttttcgctgctcccgcctgacgcgccagggaaaggcatagcgggcgtttttctgtttgcagcgtcgccgttagcgcatttccccagtgggatttgcgcacgcttacggttggaatatctaagctagtcacctggcagatgcttgcaccatgtaaacgccaggccagccgggtgctcagttcatcgccaaacgttcccggcggaaagagaacaacgtccgcaggcgttcgctgccactgttccaccaacgcatccagcacctgttccgccactacaggctgaggttcaatctgccagtgcgccagggtacaaccgctgaaatcctgcgccgccagccagcttgctattgcggcattctcctgatttattgtcacaattgcgatattcatggctgcatcctttggcgtaaatagtcctgccatagcttttgagctttttctgctaccgtttgcccatcaatcagcgtcgctccgcgtcgttgctctgctcttgccagttgcagacactgcatcgctggcatttcggcagcaacagttttacggataatttctgctttccccgcagccattcgctggcgcattcccggtactggcaaggccacttcaccgcactgacgcacggcaatcaccgcaggcaagcgaacccggcaacaacgcaacccatgttcagtacgctgttcgagggtgataaacagcgcgtcgagagtgaaacgctccacctgggtgaagcagggccagcccagcatttccgccagcaaaaatggcgtttgcccattctgcccttcgctgctttggcagccggtaattatcagatccagcggattctgatgctgccattcggcaatatggcgagcgacaaattccggcgcaaagcgcagatctgccgccgtctccagcaatacagcttcctcaaacccaagagccatgagatagcgcagccagtgcaatgcccgttcatcccccatgctcaacgcggttaaagacatcggcgtaccgttttttctctgcgccaacagcagcgcggcagcggcctgttcatcagcaccgagtaaacttcgcagtaggctaatatccggtccgcttttaccctgagccgccgcctgccactctttttccgccagcattccggcatccggttcggctttaaacgctaacagaatgttcattcgcacctcctacatttcccgccgccaccagcgggagggctttagtttctggtgcccatagccaggtcacaacaaaaccaaccaacaacactgtcgccaggagcaataaggtgacttgcattccccactgcgccagcacccacggcagcaggccagtacttaccgccgcgccaagtcgactcatggcagtggcaaaaccgacgcccaggctgcgaatgtcagtaggaaaactttccgcaggcaaaatgcccaccagattactgactgcgctaatggtggtgctgaagagaacaaaaagcagcagcgttaaactactgccggaaggcaaacaggccatgactaccagcgttgccgccagcagcaaaaaacttcccagcaaaaatttgcgatgtgccagcaggtgcgtcagaactaatcccagcagcgcgcccacaattaacaacgcattaagcatcaggctggcagtcagcgcatcttccagaccaatagtctgggcgatagttggcagccaggtataaatcacaaaccatgggattacgaggcagacaaagaagacgctgttaaacgccgtgcgccgccagtaacggctagagaacaaggttttgatgtgtttatgggtcgccgttaccacttcatcgcccagtaaaacatggggaccaaaatagcgatgcacgatagcgtgagcttctgcaaaacgcccctggcgcagtagccagcgtggactttctggcgttccccagcgtaataacgtaatcaacaacgcgggcagagctgcgcttgccagtagccagcgccaggcctccgggttttcggaaataaagtgatgtccggcaatacttgccagcacatagcctacggtccacaccacgctgaatgcgcccagcaaaataccgcgatggcggcgcggggaaaattcagccagcaaggtgtgacctacactataatcgcctcccagaccaatgccaatcaaaatgcgcagtccaataagatgctctggcgtggtggcaaaaaattgtaaaaagctagcaagcgtaatcagcaaaaagctgaaggtgaagattttttgccgaccaatatggtcggagatccacccaagaaccaggctgccaaggaacaaaccaaggagcgcgctgccgccgatcattcccgccataaacggcgtcagttgcatggcgggcgtaagctgaataatggcgtaaccaatgacgccgagaacataaccgtcggtcaggtgtgcgccgaaagtgagcgcagcaatgcggcagtgaaaacggttaagcggtaaatcatccattcgcaccggactagtgttcatctttaccccttcattgtccggtaataagaacggcttctcgcctgagaagccgaaaaggcaacgccccgtcatcgcggaacgctgcctgacacattatttttcaatcggatagatagtacccgtattcataatgccattaggatcgaactgctttttcagcccttccagcaacgcccacgcgctgccgtgttccagtttgctccagtgaacgcgatgtttaccgataccgtggtggtgcaccatgctaccgccgaggcgaatggtttcttcacagatgatcttgttgagcggattgtggtacttgtcgatttcctcttccggcttacagtcaacgacgttgtaatcgtagacgaagtacatgttggtgccgttctgatagctatgagaggaatgaccgcccagcatggtgatgtcgtcggcgtgcgggaactcagtacgaatacggttaataacgctttcgtagatttcgtggatgcagctccagcagccggatacttcggtggtaaagcccatgttgccggttttgaggatctgcacacgttcggcagccactttatccggtccccagttcaggttgttaaaccaggtttcgatcagcttgctgtccacgcgctggcattgcgggtagcgggcaacgatttccgcaatcccttcgcccgtcaccttcgcaatgcgagggttaccttcagccataaagatcagcacgcattttccgtcggcaaaatgggtgaagtgttgggtgccatcttcagcgtcatacaaacgagcgatactcggacgatacccttccaccatgatttcacgcaggatgttgaagccggttttcatgtcttccaggatatagccgtagaagaggttgttttccggggtgaatttaaagattttcactgttacttcagtgatatagcacaatgcaccttcgttgccgatgatgatgtgacgaatgtccgggccagccgcgcggcgtggcacgtttttaatgcgtgtgacggtgccatcagccaatactgcttccagaccaacgaccatatcttcgattgcgccgtagagtgtggagaactgcccgatacttcgggttgctaccaggccgcccatctgcgccagcggcttactctgcggagaatgccccgtggtgtaacctttttcacgcaacgcgttttccagcacttccagcggaacaccacattgcgccgtcgcctgcatattctcaatatcaatattaatgatttgattcatggcggagccgtcgagcaccacgctgttttctacaacagtttccagcccaccttcggtggcggaagcaccggtacgcggcacaccgttaattttgtgcgcattcataaaattcagcacacgggatacttgctctgtggaaccgagttttacgaccgctgccggaatcggcaaagtataaatgccatgaatatccggaaatttacgaaaacggtcaatactgtttttctttaatactgtttcatcggtaattacgcgatctgcaccaacaatttcctttagctggtcgacaatcgctgcgcgagataaagacatagtaattccttcctgataataaaaatggaataatcattaataagagaaaacagaaaccaccgttatgggttagcgcactaaataaccgccatcaaccactaataaatgcccgttgacataattgcttgccggacttgcgaggaatacggctgcgcccattaaatcctgagtatcgccccaacggtttgccggaatatgatcaagaacgcgctgattggtttctggattactgcgtgtcgccagcgtaatatctgttgcataatagccaggggcgataccatttacctgaatattatattgacctagttcatcacaataagctttggtgaacccggcaagagcatgtttagtggcagaatatgcaggactccattgtccacctaagtaagagaacaaactacagatattaataattttgccgcttttctgcgggatcataatttttgcagcttcatagcttaactcgaatgcggcggtcaggttcacatcaatcatcggatcccagtcggcacgaccgaagtccagcaccttattcagcttacaaataccggcattgttaaccagaatatcaactgtaccgaaacgctcacagcaagcagcgataatcttctgcggcgcgccttctgcggtgatacccacctgcatgaagtccacctcaacaccctgtttttcaatcatttcctttgtttcgccgttatctttgacgaaactaggaataaagatatttgcgccagctttggccaacgccatggcaaatgcctggcctaaaccgctattcccaccggtaacaattgcggttttacctttcagggagaaaaaatccatactgaacgcattgagagattcgatactcatagttagctccaatttccgtaaggcaaaaaaaaagaaaggtaacttcccccgcgagagggaagttacctttctcattatctctggtaactggagataatttttagcataagggcataactgctaatgtgatcgtaatcacagtgtgatattcgtattgtcaaataattttaaaaagcagaagcgtgattactctcacacaacacctctgctttccatgttatttattatttcaattactagagacctgagaaaagtaatccacctgaaagggcggcttacttttctcttttttttgtctattacaaatgggaatacgatatgcaacacaacagttatcgccgttggataaccctcgcgataattagttttagcggcggcgttagtttcgacctggcttatttacgttatatttatcaaattcccatggcgaaatttatgggattcagcaataccgagataggtttaataatgagtacctttggtattgcggccattattctttatgcccccagcggcgttattgccgataaatttagtcaccgcaaaatgattacttccgcgatgatcattaccggattactgggtctgttaatggcaacgtatccaccgctgtgggtaatgctctgtattcagatcgcctttgcgataacgacgattttaatgctgtggagcgtgagcattaaagctgcaagcttgcttggcgatcatagcgagcaagggaaaattatgggctggatggaagggctgcgcggcgtcggtgtaatgagcctggcggtgtttaccatgtgggtcttttctcgctttgcaccggatgacagcaccagcctgaaaacggtcattatcatctatagtgtggtttacatcttgttggggattctgtgctggttttttgttagcgataacaacaacctgcgcagtgccaataacgaagaaaaacagagtttccagcttagcgacatcctggccgttttgcgtatcagcaccacctggtattgcagcatggtgatttttggcgtcttcaccatctacgccattctgagttactccaccaactatctgaccgaaatgtatggcatgagcctggtggcggcgagctacatggggattgtgatcaacaaaatattccgcgcgctgtgcggcccacttggcggcataatcaccacctacagcaaagtgaaatcccctacccgcgtgatccaaatcctttccgtactcggcctgctgacgttaactgccctgctcgtcacgaactctaacccgcaaagcgtcgcgatggggattggcctgattttactgctgggattcacctgttacgccagtcgcgggctgtactgggcctgccctggcgaagcgagaacaccgtcttacattatgggcaccacggtaggtatttgtagcgtgattggattcctgccggatgtcttcgtttacccaattatcggccactggcaagacaccctgcccgctgcagaagcctaccgcaatatgtggctgatgggcatggcggcgcttggcatggtgattgtctttacctttttgctgttccaaaaaattcgtactgctgatagcgcccccgcaatggctagcagcaagtaagccaggaaaattacaggagaaaaatcatgagcaaaaaatacatcatagggattgatggcggaagtcagagcacaaaagtggtgatgtacgatctggaaggtaacgtggtttgcgaaggcaaaggcttattacagccgatgcacacgccagatgccgatactgcagaacatcctgacgacgatttatgggcaagtttatgttttgccggtcacgatttgatgagtcagtttgccgggaataaagaagatattgtcggtattggtctgggatccatccgttgctgccgtgcgttattgaaagccgatggcacgcctgctgcgccgttgattagctggcaggatgcacgcgttacacgcccttacgaacacactaaccctgacgtggcatatgtcacctcttttagcggttatctgacgcatcgcttaaccggcgagtttaaagacaatatcgccaactattttggtcagtggccggtggattataagagctgggcatggagcgaagatgctgcggtaatggataagtttaatatcccccgtcatatgctgtttgatgtgcaaatgcctggcaccgtcctcggacatatcacaccacaagccgcactggcgacacatttcccggcaggactgccggttgtttgtaccaccagtgataaaccggtagaagctctgggggccggattactggatgatgaaacggcggtaatttctcttggcacttacatcgcattgatgatgaacggcaaagcactgccgaaagatccagtagcgtactggccgattatgtcttctattccgcaaacattgctgtatgaaggttacggtattcgcaaaggcatgtggacggtgagctggctgcgcgacatgctaggcgagagcttaattcaggatgccagggcgcaggatcttagtccggaagatttactcaacaaaaaagcttcttgtgtgccgccaggctgtaatggtctgatgacggtgctggactggctgaccaatccgtgggaaccgtacaaacgcgggattatgatcggctttgattccagcatggattacgcatggatatatcgtagcatactggaaagcgtggcgctgacgctgaagaacaattacgacaatatgtgtaatgaaatgaatcactttgcgaagcatgtgatcattactggcggcggtagcaacagcgatctgtttatgcagatttttgccgacgtgttcaaccttccggcacgacgtaacgccattaacggttgtgcaagcctgggggcagcgattaatacagcggtaggtctggggctatacccggattacgcaacggctgtcgataacatggttcgcgtgaaagatatctttataccgattgagagcaatgccaaacgctacgacgcgatgaataaaggcattttcaaagacctaaccaaacatactgatgtgatcctgaaaaaaagctatgaagtgatgcatggggaattggggaatgtggatagcatccagagctggagcaatgcgtaagtgaggaaggccgggcgggaaactgcccggcctgaacatacctgaatggttatccccgctgacgcggggaacataagttcgacaacttaaaaaatgataacaagtccggtttatccccgctgatgcagggaacataataaaaactttaactagttcggtttatccctgtttttacaaggaatattaactacactcgatgtctttagaataaaagacaatacgaatcgcactttatcaattttcacttaaagtatgaactggatatctttattcataagaactattcatcaacagcgtatagaggcggttatgtaaaaccactcattagcctcaaaacaaagacaaacttccagatttattacttaaccaatgaataacaagcttaaaaaatatactgttattctaaagaaaaaattaacaggcattaattcaatattaaaaaaataatagattaaaatttcttaacgatttaagaatcatacaaataacactttgattaaatttaattttttgtatcgataattgtgaacctctctggcatggagaactattttgaacatgaggtgttacgtggatatgttgcttattacaagtactgctaatataaaaacttgagaaagagataacgggttatatggtggtttatccccgctggcgcggggaactcgacagaacggcctcagtagtctcgtcaggctccggtttatccccgctggcgcggggaacacctgttttcgcaaatctatggactattgctattcggtttatccccgctggcgcggggaacacgggcgcacggaatacaaagccgtgtatctgctcggtttatccccgctggcgcggggaacactggctctgcaacagcagcacccatgaccacgtcggtttatccccgctggcgcggggaacacgaaatgctggtgagcgttaatgccgcaaacacaggtttatccccgctggcgcggggaacacattacgcctttttgcgattgcccggtttttgccggtttatccccgctggcgcggggaacactctaaacataacctattattaattaatgattttttaagccagtcacaatctaccaactttatagtatcacacaaacaacacatccattatgttaaagagcacttaatccattgattaaaaaggtaaatatttaaaataactctatacaaactaaaatctaccaaactttaccgcaataattttcactccagcgaaaaattaatgccacagaatttgtagagaatgctaatgattagccctggatgggtaaaatggaggagttttcagaggcgacaaacaatataaatgagtagaagtctttacaggttccacccatttataacgcttataaatgtttaatcaggcaatatttagatatttatgtgtttgcatgctcaaacgccaattacgcgcaatgcaggtttcaatgcacaaacgtgtggcatcatccttttggctaatcggctgcagtgcaatgactcgcggtttatcatcggtcagcgttgccagtagttcatccagtgcttcaatatcgcgtacgcgccccactggatgcttgatttcgttggctcgctccagtgcctgactcaacacttcatagccgccgcgcatgttcagctttgggcttacggtaacccaggtattcggtgtgcagcgtacctcatgagtaccactggtttcgatctggcagctaaaaccgttcttttcgagcagatcagtcagtggcagcaaatcatgaatgcaaggctcaccacccgtaatcaccacatgccgcgcggtgtatccctggcgaccaatgacagccagcaaatcttcactgctcgcagccccccacttatcactctctttggtcttcgccagaatgctgaaaagggagacttcccgatcctcaagcttttcccaggtgtgtttggtgtcgcaccaggcacagccaaccgggcatccctgtaaacgaataaaaatggcgggaacgccggtaaagtaaccctcaccttgcagggtctggaacatctcgttaatcgggtactgcatagcattctctgtgaagtggataattgttaattattgcagatcctgccacaacaatcatgtcttattaacattctgttacaggcaggtttaaagaaaaatgcgaaacatatcgttaataattaaagggagtaacgtattatgtcagaagaaaataaagaaaatggatttaatcatgtcaaaacattcaccaaaattatatttattttttctgtattagtttttaatgataacgaatataaaattaccgatgccgccgtcaatttatttatccagatttaatgagaaatttataatgcgctatttcatactaatgttcactttcgtatgttcctttgttgcagcccaaccaactattgtcccacaattacagcaacaagttacggatcttacgagtagcttaaacagtcaagaaaagaaagaactgacgcacaagttagaatctattttcaataatacccaagtgcaaattgccgtattaattgttcccacaaccaaagacgagacaattgaacaatatgctacaagagtttttgacaattggcgtttaggagatgccaaacgtaatgatgggatactgatcgttgttgcctggagcgatcgcactgtccgcatccaggtaggttatgggctggaagaaaaggtaaccgatgctctggctggagatatcatccgtagcaacatgatacccgcatttaaacaacaaaaattagctaagggattagagctagctataaacgctttgaataaccaactcactagtcaacaccaatatccgactaatcctagtgaaagtgaaagtgcgtcttccagtgatcattattactttgctattttttgggtatttgcagtgatgttcttccctttctggttttttcatcaaggcagtaatttttgtcgcgcatgtaaaagtggagtctgtattagtgcaatctatcttttagatttattcctgttctccgataaaattttttccattgctgtattttccttcttttttactttcaccatatttatggtctttacctgtttatgtgtacttcagaaaagagcatctggtagaagttatcatagtgacaacagcggttccgctggaggcagtgatagcggcggatttagcggcgggggcggttcttctggaggtggcggcgcatccggccgctggtaactcaaccataaaaaatgccagcccggaggctggcatttttaaatcagataaagtcagtcttatgcctggcctttgatctctttacgaccgttgtacggtgctttttcgcccagagcttcttcgatacgaatcagctggttgtatttagcaacacggtcagaacggctcatagaaccagttttgatctggcctgcagcagtaccaacagccaggtcagcgatggtagcgtcttcagtttcgccagaacggtgagagataactgcagtgtagccagcatctttcgccatcttgattgcagccagagtttcggtcagagaaccgatctggttgaatttgatcaggatggagttagcgatacctttttcgataccttctttcaggatcttggtgttggttacgaacaggtcgtcaccaaccagctggattttgtcgcccagaactttggtctggtatgcgaaaccgtcccagtcagattcgtccagaccgtcttcgatagaaacgatcgggtactgtttggtcagttcttccaggaagtgagtgaattcttcagaggtgaacgctttgttgccttcgccagccagaacgtatttaccatctttgtagaattcagaagctgcgcagtccatcgccaaagtgatgtctttgcccagttcataaccagcagctttaacagcttcagcgataacagccagagcttcagcgttggaacccaggttcggcgcatagccaccttcgtcaccaacagcagtgttcatgcctttcgctttcagaacttttgccaggtgatggaaaacttcagaacccatgcggatggcttctttcacagttttcgcgccaaccggctgaatcatgaattcctggatatcaacgttgttgtcagcgtgctcaccaccgttgatgatgttcatcatcggaaccggcatagagtatttgcccggagtaccgttcagttcagcgatgtgctcgtacagcggcatacctttagcagctgcagcagctttggcgttagccagagatacagccaggattgcgttcgcgccgaatttggatttgttttcggtgccgtccaggtcgatcatgatcttgtcaatgccagcctgatctttagcatctttgccaatcagcgcctgagcgatcgggccgtttaccgcagcaacagctttggttacgcctttacccaggaaacgggatttgtcgccatcgcgcagttccagagcttcacgggaaccagtagaagcaccactcggagcagctgccataccgacgaaaccaccctccagatgtacttcggcttcaacagtcgggttaccacgggagtcgatgatttcacgaccgatgatttttacgattttggacattaggttttcctcaagtcactagttaaactgaaactccagacaaacaacgcgtacccagggtacgcgttgccgctctaacttttttacttacttcgcctgacgtttctggaactcgctggcggctttcacaaagcctgcaaacagcgggtgaccatcacgtggagtagaagtaaactccggatggaactggcaagccacgaaccacgggtgattcggaacttcgatgatctcgaccaactgatcatccccggaacggcccgcaacgcgcagacctgcatcttcaatctgtttcaacagcatgttgttgacttcgtaacggtgacgatgacgctcaacaattgtcggcgcattgtacagctggcgaaccaggctatcgtcaaccaactggcactgctgtgcgccgagacgcatggtaccgccgagatcgctcttctcgctacgaacttcaacgttgccgttttcatcgcgccactcggtaatcagcgccacaaccgggtacttacagtctggcacaaattccgtagagttggcgttctccatgttggcaacatggcgagcgtaatcaattaacgccacctgcatacccaggcaaatgcccagataaggaatattgttctcacgcgcaaaacgcgcggtcgtaatcatgccttctacgccacgatagccgaaaccgccaggtacgaggattgcgtccagacctttaaggatttcaacgccgcgcgtttcaacatcttgactatcgatcagtttgatgttgacgctgacacgattcttcagcccaccgtgtttcagtgcttcgatcacacttttataagcatccggcagttcaatgtacttgccgaccataccgatggtgacttcacttaccgggttcgcttcttcgaagataacctgttcccattcggacagattcgcttccgggcagtttaagctgaatcgtttacaaatataatcgtccagcccctgagatttcaacaggcccggaattttatagatggaatcgacgtctttcagagaaataaccgctttttccggaacattacagaacaatgcaatcttcgcacgttcgttcgccggaacagcgcgatcactacgacaaatcaggatgtcaggctggataccgatggagagcagctcttttacagagtgctgagtcggtttggttttgacttcaccagacgctgccatgtacggcaccagcgtcaggtgcataaacagagtgtgctcacggccaatttcaacagccatctggcgaatcgcttcgaggaacggcaaggattcgatatcacctactgtaccgccgatttctaccagtactacgtcatgaccttcgccaccttccagcacgcgctctttgattgcgttagtgatgtgcggaataacctgcacggttgcgccgaggtagtcaccgcggcgttctttacgcagaacgtcagagtagatacgacccgtggtgaagttgttgcggcggctcattttggtacgaatgaaacgctcgtagtgccccaggtccaggtcggtttcagcgccgtcttcagtaacgaacacttccccgtgttggattgggctcatagtacctggatcgacgttgatgtacggatccagtttcatgatggtcacattgaggccacgggcttcaagaatggctgcgagggaggctgcggcaatgcctttacccagagaggatacgaccccgccggtcacaaaaatatagttcgttgtcatgctgaacctgagaagttaggttgaaaagacgatggaataaccaagacgggaaagcagtatacccgaacatgacctgtgccacaaactttcattatccctcctcttcgccagcgcactattgaaatcaggagtgagaaaatagcccctttggggtaaatgtttttgacgcaaatcaagcgcttgtcatttaaaaaatgacacaaatggcgcttgaccgcgtaattcccttagagatcaatttcctgccgttttacctgttgccagacttcttccattgtttcgaggtcaacacctgtcatttccagtccacgcgcggcaacaatacgctccacttcgcgaaaacgacgctcgaatttttcgttcgctttttgcaatgcgatttctgctttcgtccctaaatggcgagccagattaaccgtggcaaacagcaggtcccccatttcctcctccagtttagcctggtcgacaacagcctgccgcgcttcgtacatcacctcgtcgatctcttcgtagactttatcgactaccggaccaagcgtcgtccaatcgaagccaacgttggcgcaacgtttctggattttttgcgcacgcattaaagccggtaaactacgaggaatatcgtccagcgcgctatgctgcgctttctgcgcgcgctcttcggttttgatttgctcccaacgggcaagcacttcactactgttttcggcagaactatcagcaaaaacatgcggatggcgacgctctaatttatcgctaatagcagcgcaaatatcattaaagtcaaagcgcccttcttcctgagccatttgcgcgtaaaacaccacctggaatagcagatcgcccagttcaccgcgaagatcgtcaaaatcttcacgggcgatggcgtccagcacttcgtaggtttcttcaagggtgtaaggcgcaatggtggcaaatgtctgctctttatcccacgggcagccgttttccggatcgcgcaggcgctgcataatagtgagcaaacggtcgatttgattcattgaattgtcctgaaaattgcgggtctgtcaggtggaaacctgtgaccagaatagaagtgagttagtaacattacccaatcagtacgttaattttggctttaatgagttgtaattcctctggggcaactgttcctttcttcgttgctcctcttgcccgccaggcgatactttttacctgatcagctaacgctacgccatcacgttcctgaccggataaaacaacttcgaacggatatcctttactttgcgttgtacaaggaacacacagacacatacctgttttgttgttgtacatgaaaggactcaggacaacagctggacgatgtccagcttgctcgctaccttttgtcgggtcaaaatcaacccaaatcagatcgcccatatcgggtacgtatcggcttaccattaccagacttccttatctttcggctctccccagtcgatattctcgtggaggttttccggcgtgatgtcgttgaccagttcagcaagcgtaaatacgggctctttacgcactggctcaataattaatttgccatccaccaggtcaatcttcacttcatcatcaatattcagattgagcgcctgcattaacgtagccgggatccgcaccgccggactatttccccaacgctttacgctactgtggatcataaccctttcctcaaaccgctatcatatgtagatacagtatatatcaatctacattgtagatacgagcaaatttcggcttaactcccgtgcaaccgacgcgcgtcgataacatccggcacctggttgagtttacccagcacgcgccccagcacttgcaggttgtaaatctcaatggtcatgtcgatggtcgccagttgctgtttggtgtcgctacggctggcaacgccaagcacgttcaccttctcgttggcgagaatggtcgtgatatcacgtaacaacccactacgatcattagctaccacgcggaccaccaggctatatccggcggagtagctctcaccccataccgcgtcaacaatgcgttctggcgcatgggagcgcagttccgccagttgttcgcaatcggcgcggtgtacactaataccgcgcccctgggtaatgaagccgacaatctcatctccaggaatcggctggcagcagcgcgcgatgtggtgcatcaggttgccaacaccttcgactaccacgcgaccgttatctttactgcggttttgcggcgtgtagcttttttgctgaagttgcttcagcgcggcggcgtcctgctcttcggcactcggcttattaaattggctttgcaggaagttcaccatctgattgagacggatatccccgccaccaatcgccgccagcaactcgtcgacatcattgaagttgtaacgcggcagcagatgtttttctgcttctttcaggctgatccccagatgttccagctcgtcgtcaaggatttgccgcccagccagaatgtttttgtcacggtcctgtttacggaaccaggcgtgaattttgctacgcccacggctggttgtgacgtaaccgaggtttgggtttaaccagtcacggctggggttcggctgtttctgggtgataatttcaatctggtcgcccatctgcagctggtaggtgaacggcacaatgcgcccgccaatttttgccccgatgcagcggtgtccgacatcactgtggatgtggtaagcgaagtccagcggcgtacttcccgcaggcaaatcaacgacatcacctttcggcgtaaagacgtacacccggtcgtcaaagacctgactacgtacttcgtcgagcatttcgccggaatcagccatctcttcctgccacgcaatcagtttacgcagccaggcaatccggtcttcatgtccgctacgtgcgccgccagcagccgcgccctctttatatttccagtgcgcagcaacacccaactctgcatcttcatgcatctgtttggtgcggatttggatctcaacggtttttccacccggccccagaaccacggtatgaatagactgataaccgtttggtttcgggttagcgacgtaatcgtcaaactcatccggcaggtggcgatagtgagtgtgcactatccccagtgcggcatagcaatcctgtaaacgctcggcgacaatacgtaccgcacgcacatcaaacagctcatcaaaggcgaggttctttttctgcattttacgccagatgctgtagatgtgtttcggacgaccatacacttccgctttaacgccttcagctttcatctcagcgcgcagatgaccaacgaactcttcgatgtagtgttcgcggtcgagacgccgttcatgcagcagtttggcaattcgtttgtattcggttggatggaggtaacggaagcagtaatcttccagttcccatttcagttgtccgattccgagacggttagccagcggtgcgtagatgttggtacactcttttgccgccagtacacgttcatcttccggcgcatcttttacttcgcgcagatgagcaatacgctccgccagtttgatgactacgcagcgaaaatcatcgaccatcgccaataacatccggcgaacgttatcgacctgttcggaggaaacagaatcagtgtgcgtcgctttcagctggcggatcgccgccatatcacgcacgccgtgaataaggttaacgacgctcttaccgacgctctcacgcagcacatcttcgctgactacgttggcatccgccagagggaaaagcagcgccgcccgcagcgtgtcaatgtccatacttaatgtgctgaggatctccaccatctcaacaccacgccacaataacagactggcatccggatgcccctgcgtctgttgcagacaatacgcccaggtttcggctaagcactcacagctcttctggctggtaatacccagacttgcgatccatttttccggatcaaattcaccagccttattgatatgtgcacttcttaccgcaaccatcgtcctctcctttagggaccagacctgccgaaatcggcaaatcgcaattatttaacgcggctgaaaagtaccatgctttccagatgtcccgtgtgtgggaacatatccagcatcgccagtcgcgcaatggtatatcctgcttttaataacgcttcgctatcccgagccagcgttgcagggttacaggatacataaactatacgaataggttccagttttataatttgctgcataacacctgcggcacctgctcgcgccgggtccagcaacactttatcgaagccgtttttcgcccacggctgctttgtgacatcttcttcaagattttcgtgataaaacgtcacattctgtaagccattaagacgcgcattctgctggcctttttccaccagcgccggaacaccttctacaccgaccacactggcagcttgtgtcgccaatggcagtgtaaagttgcccataccgcagaacagatccagtacgcgatcttcaggttgcacatccagccattccaacgcacgcgctaccattttttggttcacacccgcattgacctgaataaaatcgcgcgggctaaaagttaagcgcaacccgttactgtcataccagggcatctcaccagagacggtttcgagtatctcactatcgggggcgagatacagatccaggccttcagaatggctaaagcgttccagtttttcgcgatctgcgctacttagcggtgcggtatggcgcaaaatcatcagcgtgccgctggttgcctgtaccagttcaacatgaccaagatggcgcatagcttgtaagctgcccagacatgccctgactttgggcagcaatgcttcaagttggggcgctaaaatggggcattgtttgacgtcgacaatgtcactggagcccgctttgcgaaaccccatctgaagttgctgtgttttcggtaagtagttcagacttaaacgcgcgcgacggcgatagccccagggaacatcggcgatcacttcagagacatcgtgtttcattaatcgggcgagtgccgcacttttgcttcgctgctgtaaatccacgctggcgtgttgttgctgacagccaccgcatacgccaaaatgaggacagcgtggcgtttcgcgttccgggctatcgcttaaccggcgtacgactttagcgcgggcatactgttttttatcttcagtaacagtaacttccgcgttttcctgcggcaataatccggggataaatagcgttttgccgttatgtcgcgccacgccctgaccaaaagagtcgaggtcgttgacactaacggttatgatctgacgcgtcgtcgtgcgtcgttttgcagagtagaattgcgccattggcgagactttctcaatttaacagtgtgaccttaattgtcccataacggaactccatgaccaactacagcctgcgcgcacgcatgatgattctgatcctggcaccgaccgtccttattggtttattgctgagtatctttttcgtcgtgcatcgctataacgacttgcagcgtcaactggaagatgccggtgccagcattattgagccgcttgcagtttctactgaatatggcatgagcctgcaaaatcgcgaatctatcggtcagttaataagcgtactgcatcgtcgccattccgatattgttcgcgcgattagcgtttatgatgaaaataaccgactctttgtcacctccaattttcatcttgatcccagtagtatgcagctcggcagcaacgtgccgtttcctcgccagctcactgtcactcgtgacggcgatattatgatcctccgcacgccgattatttctgagagttactcccccgacgaaagccccagtagcgatgccaaaaatagtcaaaatatgttgggatatattgcgctggagctggatcttaaaagcgttcgcttgcagcaatataaagagatctttatttccagcgtgatgatgctgttttgtatcggtattgcgcttatttttggctggcgcttaatgcgcgatgtaaccggtccgattcgcaacatggtgaataccgtcgaccgcatccgtcgcgggcaactcgacagccgggtggaaggatttatgctcggcgagctggatatgctgaaaaacggtatcaacagcatggcaatgagcctggctgcttatcacgaagagatgcagcacaatatcgaccaggcgacgtccgatctgcgtgaaacgctggagcagatggaaattcagaacgttgagttagatctggcgaaaaagcgcgcccaggaagcggcgcgtattaaatccgagtttctggcaaatatgagtcacgagctgcgtacaccactgaatggtgttattggctttacccgcctgacgctgaaaacagaattaacaccaacgcagcgcgatcacctgaatacgattgaacgtagcgcaaataatttgctggcaattattaatgatgttctcgacttcagcaaactggaagcaggtaagctgattctggaaagtattccattcccactacgcagcacgctggatgaagtcgttactctgctggcacattcttctcacgataaagggttagaactgacgctcaatattaaaagcgacgtgcctgataacgtgatcggcgacccgctgcgattacagcaaatcatcactaacctggtggggaatgcaattaaattcaccgagaatggcaacattgatattctggtagaaaaacgtgcgctgagtaataccaaagtgcagattgaagtgcagattcgggataccggcattggtattcctgaacgcgatcaaagccgcttattccaggccttccgacaggctgatgccagtatttcccgccgtcatggtggcaccgggctggggctggtgattacacaaaaactggttaatgaaatgggcggcgatattagcttccatagccagccgaatcgcggtagtactttctggttccacattaatctcgatctgaacccgaacattattatcgaagggccatccacccagtgcctcgcaggtaagcgcctggcctatgtcgaaccaaactccgcagcagcgcaatgcacgctggatattttaagtgaaacgccgctggaagtggtttatagcccaacgttctccgcgctgcctcccgcgcattacgacatgatgttgttaggcatcgcggtgaccttccgcgagccgctaacaatgcaacatgagcgattagcgaaagcggtaagcatgaccgatttcctgatgctggcacttccttgccatgcacaagtcaatgctgaaaaactcaagcaagatggtatcggcgcgtgtctgctgaaaccattaacacctacacgcctgttgcctgccctgacggaattttgtcatcacaaacaaaacacgcttttgcctgtaaccgatgaaagtaagctggcaatgacagtcatggcggttgatgacaaccccgctaacctgaaacttatcggcgcattgctggaagatatggtgcaacatgtggaactttgcgatagcgggcatcaggcggttgaacgggcgaaacagatgccgttcgatttgatcttaatggatattcaaatgccggacatggatggcattcgggcctgcgaactcatccaccaactcccgcatcagcaacaaacgccggttatcgcggtaacggcgcatgcaatggccgggcaaaaagagaagctgcttggcgcagggatgagcgattatctggcgaaaccgattgaagaagagcgattgcataatttgttgttgcgctacaagcctggcagcggtatttcctctcgcgtcgtgacgcccgaagtcaacgaaattgtggtgaacccgaatgcgaccctcgactggcaactggcactacgccaggcagcaggaaaaaccgatttagcgcgcgatatgctgcaaatgttactcgatttcctgcctgaagttcgcaacaaagttgaggaacagctggttggagaaaacccggaaggcctggttgatttgattcataaactgcatggcagttgcggctatagcggtgtgccacgtatgaagaatctctgccaactgatcgaacaacagctacgtagcggtactaaagaagaagatttggaaccggagctgctggaactgttggacgagatggataatgtcgcgcgcgaagccagcaaaattctcgggtaatggatgtcttgtcgagtagcaatcggctttttatgacgctggtttcagattggtgacaaagtgcctgtgtttatgccggatgcggcgttaacgccttatccggcctacaaaaccaattaaattcaatgaattaaaaaatgatgtagacctgatacatagcacaacaggctattttgcgtttagcatcagtctcaaaccggctccagatagagccggttttggttttctgtcttaacgcaccatgcacgggcgcttgttatcgaacgtccagccaggaatcagatactgcattcccatcgcatcgtcacgcgcgccaagcccgtgtttctgatacagctcatgggctttcatcacttgatccatatcgatttctacacccagccccggtttttctggcacctgtaccagcccgcctttgatctcaaacggttctttggtcaggcgctgattgccttcctgccaaatccagtgcgtatcaatagcagtaattttacccggtgcagcggcggcaacatgggtaaacatcgccagggaaatatcgaagtggttgttagagtgactaccccaggtcaggccaaattcatggcacatttgcgccacacgtacgctaccttgcattgtccagaaatgcggatccgccagcgggatatcaacggattgcagggagagcgtatggcccatttgccgccagtcggtggcgatcatattggttgcagtcggtagacctgtcgcgcgacggaactctgccatcacttcacgcccggagaaaccttgctccgcaccacacggatcttctgcataagccaggctacctttcaggtatttaccgattttaatcgcttcgttcaggctccaggcaccgttaggatcgagcgtaatacgcgcctgcgggaagcgttgcgccagtgccacaatagactcggcctcttcttccccggccagtacaccgcccttcagtttgaaatcgttgaagccatatttttcatatgccgcttccgccaggcgcaccaccgcatccggcgtcatcgcttcttcatgacgcaggcgataccagtcgcaactgtcatccggctggctttgatacggcagcggcgtggctttgcgattaccgacgaagaacagataaccgagcatttcgacttcgctacgctgttgaccatcgcccagcaggcttgccacgtttacccccagatgctgccccagcagatccagcattgccgcttctatcccggtaactacatgaatagtggtacgtaggtcaaatgtctgcaaaccgcgcccaccagcatcacgatcggcaaaagtattacgcaccagcgtcagaacgtttttgtattcacccagcgttttacctaccaccagcggaatcgcatcttccagcgttttacggattttctcgccgccgggaatttcccctacgccagtgtgaccagaattatctttgataatcacaatattacgcgtaaagaacggtgcgtgtgcaccactcagattcatcagcatactgtcatgacccgccaccgggataacctgcatttcagtaacaacaggcgtcgtaaattgagaactcatatttatgtcctttttcagaatcaatgacggccgaaaacgggacgtttacggtcaaaggtccagccggggatcaggtactgcatcggacctgcgtcgttacgcgcaccgccaggcagacgtttataggcctcatgtgccttttgtacctgttcccagtccagttccacgcccagaccgggcgcatcaggaacggcaatttttccgtttttaatctccagcggattttgggtcaggcgacaatcgccctcctgccaaatccagtgggtatcgatagcggtaggattacccggtgccgccgcgcccacatgggtaaacatcgccagagagatatcgaaatggttattagaatggcagccccaggtcagcccccagtcgtcgcaaagctgcgccacacggactgcaccggaaagcgtccagaagtgcggatcggcaagtggaatatctaccgcattgagcatcaccgcatgacccatttcgcgccagttggtggcgatcatgttagtcgcgacgggcaagccggtcgcccgtcgaaattccgccatcacttcacgtccggagaagccctgttctgcgccgcatggatcttcggcataggtaagaacatcattcagccctttgcataaagaaatggcttcatcaagcagccatgcaccgttgggatcaacggtaatccgcgcatccgggaagcgtttcttcaatgcacgaacagtgtcgatttcttgctcgccaggtaacacgccgcccttaagtttgaaatctttaaagccgtagcgatcctgactggcttccgccagacgcacaacggcttcgctgttcattgctttctgatgccgcaactgataccactcatggttgcccggcgtattttccacataaggaagatcggttttggtccgatcaccgatataaaacagataaccgaggacggtaatagcctcgcgttgcttgcctggccctaacagttcgcagaccggaacattcagcgccttacctagcaggtcaagcaaagcggcttccagcgccgccacggcgttaacgcgtaattcaaaggtccaggcacctttaccgaaggtatcaaaatcggcggcctgattacctttatgcacctgctggaccactttattcagtcgcgcaacttcctggcccagaaccatcggaatagcatcgacaagcgtctgataaatcacatctccgcccggcgcttcaccaatgccggtatgcccggcgttatcggtgagtaccacaatattgcgggtgaaatatgcgttatgtgccccaccaatattaagcaacatgctgtcatgcccggccaccggaatgactttcatatcagtaataacaggactggattgtgtcgccatcttattgccccgcaacaggtttcaactcgatacgcttgatatcgcccaccagcaccaggtagctcagtaccgcgattaaggcatgaacaccaacataaatcagcgccccattaaagctgccagtcgtgccaacgatataaccaattgcgattggcgtgacgatgccagaaatgttaccgaacatgttgaacaggccaccggaaagaccgctgatctcttttggcgcggtatctgccattactgcccaacccagcgccccgatgcccttaccgaagaaggccagcgccataaagccgatgatcatccactcaacgttgacgtagttgcagaacaccatcaccatgctcagcaacatgcccattacgatcggtgttttacgcgcaatgttcaggcttcccgtgcggcgcatcagccagtcggaaataatcccacccagcacaccgccgataaaaccgcaaaccgccggaacggaagccacaaagcccgctttcagaatgctcatcccgcgtgcctgcaccagataaaccgggaaccaggtaataaagaagtaagtcagggcgttgatacagtactgaccgatataaacgccgatcatcatccgactccctagcagctgtttgatctgcccccacttcacgctgaacggcactttaactttggtgttttgctgatccatattgatcagcgcaccacccgcggcgatgtactccagctctttcttatttacccccggatgttgatttggctcgtggatgactttcaaccagataaagctgatgacaatccccagaccgcccataaagaagaagacgtgactccagcccacttcatgcgtcagccagcccataatcggcgcgaagatcaccgttgcgaagtattgagcggagttaaaaatgctcaccgccgttcccctttcctgcgccggaaaccaggccgcaacaatgcgactgttgccggggaaagatggcgcttcagcaagcccgaccaggaagcgcagcgtaaacagggcaacgataatgccgaatccactaaagatatcgacgaagccttgcagcaaggtaaacatgctccagataaagatgctccagaagtagacgcgtttactaccaaaacggtccagcaaccagccaccagggatctgcccgataacataagcccaactgaaagcagagaacacatagcccattcccacgggatcaaggccgatatctttggccatttcgctaccggcgatagagagcgtagcgcggtcgccgtagttgaaggatgtgacgataaacaacatcaccactatccagtaacgagcatttgtgcgtttttccacactgctcgcagcctgacttaaagaactcattgttgcactcctgaaaattcgcgttagccacgctcactctggactgcgacatcgccaggaaatcagaggtgacgtagggtgttttttgccgtttttataggtcgttcgccgaatacggcgcgtgtttatatctggcaatagcagtataaaaagcgcgccatagcggctcaccgtgcaacaacacaacattaatgcgttcaatgaggcccgattttggcattagccctggacggtggaatccacttcacggaaatgaaaacaagaacaagaaaggaagggttaaaacgaagaaataaagaagagtatgaaatggatcgcttgactccaggcaaacgccagtaaaaatccgcgctatgaagcagtttttactggcatttgcctgaaaagattcgattcagcaccgctaaaacgacatttaccgctcgctgaacatatcaggacaacagcgtgccccactgttcgacccacggattactttccgtttccggttccgggttctcactggcgtcaatcaacagcatttcgccaacccgctgagcgctctgttcctgcaacaaggcatcgaactgtttgccgccattgcagaaattcacataactactgtcgccgagcgcaatcacgccataacgcagattcggctggaagcccagactatctttgattccctgaaagagtggcacaatgctatcaggaaggtcgccctgcccggtcgtggacgtaaccaccagaacatacttatcctgatagggcagccagtcgcttaattcaggatcttcaaataccgttgctttgtggccctgcgcggtcagaatcgcttccgcttcttcggccactaacagactattcccgtacatggtgccgacaaaaataccaatttccgccataccgttttctccctggattaggaacttatctctccatcctgaccgcttggcgcactgaactcaaccctttcattttcaggaagcagaccgcgccagccaaattgacttaacgcctgcatccaggtgtcgtccaggcccgcgtgaatagtcagcggctcgccagtaaaaggatgcgtcaaactcaactgactggcatgtagcattaaccgctggaggccaaaatgctcagcaccgctgcgattctggcgtaaatcgccatgtttgctatcgccaataatcggatgacgcaaatgggcaagatgtcggcgaagctgatgtttgcgtccggttttcggctccagttccaccaggccgtagcgcgtggtcgggtaacgtccggtcgctaccggcatttctacggtcgccagaccgcgataatgcgtcactgctggctgcgggcctttatcttcgcgggcaaatttatcagcgattttgtccagttcttccaccagtggataatccagcaccgcttcttccatcaaccagccgcgcacaatcgcatggtaacgtttctggatttggtgctgttcaaactgttgtgccagcagccgtccggcctcgctggataatcccatcaacaacacaccagaagtgggtcggtccagacgatgagcagtaaaaacatgctggcctatctggtcacgcacggtttgcatgaccactactttctcgtcgcgatccagccagctgcggtgaaccagccagccggagggtttatttaccgcaaccagccattcatcctgatagagtatttccagcattagctcgcatcatccgcaaaaagagcatccagtttttccagctcagccagaataagcgcgcgttgcggatggtccgtcgccagcgccatttcataatagggtgcaacggcaaaagcgcccggtaacggctgtttgttatctaacaaatcgtgcattcgcgggatcagcacccactgcaaccactccagtggttccatggtgtccataaagaacggttgggtactattaaattgatgcggctggggttcatcgtttcgccagtgctgatgttcacgcagtaacgcttcaagcgcctgcaactggagacgaacgcggtcatgagtggtcataaagcaacctcaataagaaaaactgccgcgaaggatagcaggaataaaaaaagggagcactgtattcacagcgctcccggttcgtttcgcagcattccagctacttttgttgctccctgctcatccttgacaacttttcctctggccttgcggccaatcgttcatcctgaactattgcttcctgctcacaccaccccgatgtgatacttcatcctgaagtgtccctggccttcctgacccaccgaatcatcctgaccggttctcattctccatcctggaggtgtcctttaacgcgtcctgcgtcatcctcttcgcttcatccagaagcctttccctgaaacaccatcctggtgtgtcctgcagaagtgtcatcatcctgatgttcacttcgttgtctgactccctgtcgacgaagatagaatcgtctttttcgcgaagtcttacaaggcgcttacagacaatgccttaaggaaaatttcatatgaaagttaagaattaacaatcaacattttgattttaaatgaaaataacgattcttatctttttaagtattcgcttatttcctggcgatctcctacagagtctgtaagagatctctcacaaccagatggggtatttggattacagaagaggcttaagttgattaaggaattccgcaagattactggctaaatgcgtccgtttacgtgttcccagcgtctctttgcacacttcaccggagagattacacacgctgatgacctctaactcttcttccagcgtcgcgataaatagtgtgggcggcagttttagccttttctgagtcaccagatgaccaatcagattttcctgcacccgacggaagtcgtcttcactccaggtttgcagcaatgtcagtttgatatcgccaaactgcgcgtgcatatccccggcaaactgagtcgtataaaaggtatgaattgtgggttgtatcacaatatcaaaagcgcgttcaaccgcgtttacattttgttccccggtaaacggctggggttgccagtatacggcatcttcggtagtactaataatgcacggactaggaacaccgtacagttcctcacttaacggccagcttttatgctcttcatgccacgcatcgcagtagcgtgcagtaaaatctttcagggcttgtgcggtcaaatcgtccactaatttctctcttcacttaaaccagatacacttgtcgtttagtttatctggtttatgacggtgaaacatgtcttcttatgcaaaccatcaggcacttgcgggcctgactcttggaaaaagtaccgattaccgggatacctatgacgccagcctactgcaaggcgttccacgcagcctgaatcgcgacccgctgggtctgaaagcggataacctgccttttcacggtacggatatctggacgctgtatgaactttcctggctgaatgcgaaaggtttgccgcaggtcgctgtcggtcatgttgaacttgattacaccagcgtaaatctgattgagagcaagagttttaagctctatctcaacagttttaaccagacgcgttttaataactgggatgaggtgcgccagacgctggagcgcgacttaagcacttgcgctcagggtaagattagcgtggcgttatatcgtcttgatgaactggaaggccagccgataggtcattttaatggcacttgcattgatgaccaggatatcactatcgataactatgaattcactactgactatctggagaatgccacctgtggtgaaaaagtagtggaagagacgcttgtcagccacctgctgaaaagtaactgcctgatcacccatcaaccagattggggtagcctccaaattcagtatcgtggacgccaaattgacagagaaaaactgctgcgttacctggtcagtttccgtcatcacaacgagttccacgaacagtgcgtggaacgcatctttaatgacctgttacgcttctgccagccagaaaaattgagcgtttacgcacgttatacccgtcgtggcggtctggacattaacccgtggcgcagtaatagcgattttgtcccaagcaccacaagactggttcggcaataaatttttctcaattttgcgtgctggattcacgcagaaggttgtgaaaggtcatcaggcagggctattgtaatcaaagggaatgacgatattcgtcccataaggagtttttcttgattacacatattagcccgcttggctccatggatatgttgagccagctggaagtggatatgcttaaacgcaccgccagcagcgacctctatcaactgtttcgcaactgtagtcttgccgtactgaactccggtagtttgaccgataacagcaaagaattgctgtctcgttttgaaaatttcgatattaacgtcttgcgccgtgaacgcggcgtaaagctggaactgattaatcccccggaagaggcttttgtcgatgggcgaattattcgcgctttgcaggccaacttgttcgcggtcctgcgtgacattctcttcgtttacgggcaaatccataacaccgttcgttttcccaacctgaatctcgacaactccgtccacatcactaacctggtcttttccatcttgcgtaacgctcgcgcgctgcatgtgggtgaagcgccaaatatggtggtctgctggggcggtcacagtattaacgaaaacgagtatttgtatgcccgtcgcgtcggaaaccagctgggcctgcgtgagctgaatatctgcaccggctgtggtccgggagcgatggaagcgccgatgaaaggtgctgcggtcggacacgcgcagcagcgttacaaagacagtcgttttattggtatgacagagccgagcattatcgccgctgaaccgcctaacccgctggtcaacgaattgatcatcatgccagatatcgaaaaacgtctggaagcgtttgtccgtatcgctcacggtatcattatcttccctggcggtgtgggtacggcagaagagttgctctatttgctgggaattttaatgaacccggccaacaaagatcaggttttaccattgatcctcaccggcccgaaagagagcgccgactacttccgcgtactggacgagtttgtcgtgcatacgctgggtgaaaacgcgcgccgccattaccgcatcatcattgatgacgccgctgaagtcgctcgtcagatgaaaaaaagcatgccgctggtgaaagaaaatcgccgtgatacaggcgatgcctacagctttaactggagtatgcgcattgcgccagatttgcaaatgccgtttgagccgtctcacgagaatatggctaatctgaagctttacccggatcaacctgttgaagtgctggctgccgacctgcgccgtgcgttctccggtattgtggcgggtaacgtaaaagaagtcggtattcgcgccattgaagagtttggtccttacaaaatcaacggcgataaagagattatgcgtcgtatggacgacctgctacagggttttgttgcccagcatcgtatgaagttgccaggcagtgcctacatcccttgctacgaaatctgcacgtaatctccgctcccccggtgacgtttgttgccgggttttctcgtttttggtcacttactcatcaactcatttcatttgttatatgaatgtttcttaccaccctcacgcgacaaatatcatcacagttaatatgtcatacaatttatgttgcaacgcaaacgtttccctattttcataaaccgtattttatcgctatgaaaaagaaattatcgccatgattaactaaaagtattgattttttcagttcaacctacatatattgcgcgccccggaagaagtcagatgtcgtttaatgggcaaatattgcccttaaattctcttttacttttgatttacagagtaaagcgttgggataatctatcttccaagtagattattgtatttgagatcaagatcactgatagatacataacttgtgtgtatctttccgccctcaaattattacggcggtaaatgattaagccatcgccgatagacagatttcatttttacggtcaggcaccttcccgggctgaactggctaaaagctgaattatttgcattcctccaggagaaatagatggaaacgactcaaaccagcacgattgcgagcaaagactctcgtagtgcctggcgcaagacagacaccatgtggatgctgggcctttacggcacggcaatcggcgcgggcgtgctgttcctgccaatcaacgccggtgttggcggtatgatcccgctgatcatcatggctatccttgcgttcccgatgacgttttttgctcaccgcggcctgactcgcttcgtactgtctggtaaaaacccgggcgaagacatcaccgaggttgtagaagaacactttggtattggcgcaggtaaactgattaccctgctctacttcttcgctatctacccgatcctgctggtttatagcgtggcaatcaccaataccgttgaaagcttcatgtctcaccagctgggtatgacgccaccgccgcgtgcgattctgagcctgatcctgatcgtgggtatgatgaccatcgttcgcttcggtgagcagatgatcgttaaagcgatgagtattctggtattcccgtttgttggcgtactgatgctgctggctctgtacctgatcccgcagtggaacggcgctgcactggaaacgctgtctctggacactgcatctgcaaccggaaacggtctgtggatgaccctgtggctggcaattccggtaatggtgttcagcttcaaccactctccgatcatctcttctttcgccgttgcgaagcgtgaagagtacggcgatatggcagaacagaaatgcagcaagatcctggcattcgcacacatcatgatggtgctgaccgtaatgttcttcgtcttcagctgtgtactgagcctgactccggcagacctggctgcggctaaagagcagaacatcagcattctgtcttacctggctaaccactttaacgcaccggttatcgcgtggatggctccgattatcgcgattatcgctatcaccaaatccttcctcggtcactacctgggcgcacgtgaaggcttcaacggtatggtgattaaatctctgcgtggtaaaggtaagtctatcgaaatcaacaagctgaaccgtatcactgcgctgttcatgctggtaacgacctggattgttgccaccctgaacccgagcatcctgggtatgattgaaaccctgggcggtccaatcatcgcgatgatcctgttcctgatgccgatgtacgcaattcagaaagtaccggcaatgcgtaagtacagcggtcacatcagcaacgtattcgttgtcgtgatgggtctgattgcaatctccgcaatcttctactctctgttcagctaagtcctttcgcgccgctttcgggcggcgcttcctccgttttaacgcgatgtatttcctatgattagcgtattcgatattttcaaaatcggcattggcccttccagttctcataccgttggaccaatgaaagcgggtaaacaatttaccgacgatctgattgcccgtaacctgcttaaagacgtgacccgcgtggtggttgacgtgtacggcagcctctctctgaccggtaaaggccaccacactgatatcgccattattatgggcctggcgggtaacctgccggataccgtggatatcgattccatccccagttttattcaggatgtgaatactcatggtcgcctgatgctggcaaacggtcagcatgaagtggagttcccggttgatcagtgcatgaacttccacgccgacaacctttctctgcatgaaaacggtatgcgcattaccgcgctggcgggcgataaagtcgtttacagccagacttactactctattggcggtggctttatcgttgatgaagagcattttggccagcaggatagcgcaccggttgaagttccttatccgtacagtagtgcagccgatctgcaaaaacattgtcaggaaaccgggctgagtctctctggcctgatgatgaaaaacgagctggcgctgcacagcaaagaagagctggaacagcacctggcgaacgtctgggaagtcatgcgcggcggtattgagcgcggtatttccaccgaaggcgtgttgcctggcaaactgcgcgttccacgccgtgctgcggcactacgccggatgctggtcagccaggataaaaccaccactgacccgatggcggttgttgactggatcaacatgtttgcactggcagtgaacgaagagaacgctgctggcggtcgcgtggtgactgcgccgactaacggtgcgtgcgggattatcccggcagttctggcgtactacgacaagtttatccgcgaagtgaacgctaacagtctggctcgttacctgctggtagccagcgccattggttctctttataagatgaacgcgagcatttctggtgctgaagtgggttgccagggtgaagttggcgtggcgtgcagtatggcggcggctggtctggcagaactattaggcgcaagcccggcgcaggtgtgcatcgcggcggaaatcgccatggagcacaacctcggtctgacgtgtgacccggtcgccggacaggtacaggtgccatgcatcgagcgtaacgccattgcggcagtaaaagcggtgaacgccgcacgtatggcgctgcgccgtaccagcgagccgcgcgtctgcctcgataaagttatcgaaaccatgtacgaaacaggtaaagatatgaacgccaagtaccgcgaaacctctcgcggcggcctggcaatgaagatcgttgcctgcgattaatcgctctccaaaggcctcgttttgcgaggcctcttcccgatttctcatccagccgtagcctgttccggcatcgaatgttacccttatcgcctgatctttaagggggttatcgtggctgttcatttgcttattgtcgatgcactgaatcttattcgtcgcattcatgccgttcaggggagcccctgtgtcgaaacctgccagcatgcgctcgatcagctcattatgcacagccagccaacccacgcggtcgccgtttttgatgatgaaaaccgcagtagcggctggcgtcatcagcgtttaccagattacaaagcgggtcgaccgccaatgccggaagagttgcacgacgagatgcctgcattacgcgccgcctttgagcaacgcggcgtcccgtgctggagtaccagcggcaacgaagccgatgacttagccgccacgctggcggtcaaagtgacacaggccgggcatcaggcaacgattgttagcacagataaaggctactgtcagttacttagtccgacattacgtattcgtgattacttccagaaacgttggctggatgcgccatttatcgataaagaatttggcgttcaaccgcagcagttgcccgattactggggacttgcggggatcagcagtagtaaggtaccgggtgttgcgggaatcggaccaaaaagcgccacgcagctgctggtcgagtttcagagtctggaagggatatatgagaatctggatgcggttgccgaaaagtggcgcaaaaaattagaaacccataaagagatggcgtttctgtgccgcgatattgcccgcttacaaaccgatttgcatatcgacggcaatttacagcaattgcggttggtacggtaacggcgagccggatacgccgcaaacgtcgtatccggcattatcacatcagcgcatttaccaggcggtatggtaaagctctacaatatcctcaagcgttgcttcacgcgggttgccaccggtacaaacatcatccagtgccgcctgcgccagtgccggaatgtcttccttgcgtacaccaacatcacgcaaatgtggcggaataccgacatcacggttgagagcaaacaccgcttcaacagcggcattacgcgcctcttccaggctcataccttccactttcacgcccataacgcgcgcgatatcgcggtacttctcaccggtaaagtcagcgttataacgcatgacatgcggtaacaggatggcgttcgcaacaccgtgtggagtgttataaaacgcgcccagtggatgcgccataccatgcaccaaccctaacccaacattgctgaagcccatacccgcaacatactgcccgagcgccatttcttctccggcatccttatcaccagcaacgcttcctcgcagcgccccagcaatgatttcaatcgctttaatgtgcagtgcatcggttagcgcccacgcgccacgggtaatatacccctcaatagcatgagtgagcgcatcgacacccgtcgcagctttcagcgctggaggcataccatccatcatgtcagcgtcaataaacgccacctgcgggatatcatgcggatcaacgcaaacaaacttgcgccgtttctcttcgtcagtgatcacgtagttaatggtcacttctgccgcagtacctgctgtggtaggaattgccagaatcggtacactgggtttattggtcggggaaagcccttccaggctacgcacatcggcaaactccgggttgttgctgataatgccaatcgctttacaagtatcctgtggagaaccaccaccaatagcgatcaggtaatccgcgccgctattctggaatacaccgagcccttctttgacgacagtaattgttgggttgggcactacgccgtcgtaaatcgcccatgccagccctgcagcatccatcttatcggtcactttcgccaccacgccgcattgcaccagcgttttatcggtgacgatcagcgccttctgataaccacggcgtttcacctcatcggttaaagccccaacagcaccccgaccaaaccatgccgtttcgttcagaatcattctgttagccatcatccttctccttgttgctttacgaaattactcttcaattcgtaacccataggttttgaatttctccagcactacggcaatctcttcatcgctcagcactggcaccgggtccgtaatcgccagggtcgtcaggtaaagttgcgccagcacttcaacttcatgcgccagccataacgctttttccagattcacctcacaagcgataagcccatgatgttgtaacaaagttgccttacgatttttgagagccagcgcaacatgttcagaaagttcgcgtgttccaaaggtcgcataaggcgcgcaaggaatagaattaccgccagccgccgcaatcatgtagtgaatagcggggatgcttcggttaagaatggaaactgccgtgcaatgaacggcatgattgtgaacaaccgcgttggcatccggtctgctttgataggctgccatatggaaacgccattcgctactggggagctttccttcctcatgtttaccgttgccatcaataaagacaatatggctctccgtcagtttttcatatggaatgcctgtaggcgtaatcagcatcccatcctgataacgtacactgacgttccccgctgtcccctggttcagtcccaggcgggtcatttccaggcaagtgtcaataatctgacgagcaagtttatttcgttccattagctacctctctctgattcaaaacagggcaataatgttgttcctttcacactattgaattagccgtttaattacccaccatcttcttcctgattaacaagaaagaaattcacaagcttatattttgtgacctggttcaactaatcacagtaaataactgcaagttctctttttataaccccattaaaaatgaccgctcttaaaaatatttatcaaaacggtcatttttctattcctccaagcccggaatgaccgttttcggcacaaacaattaatacggtcatctgatttgtgttttttatgatttattttctgaaacgggcatgaaatttcgattattaaagtgatggtagtcacataaagtcaccttctagctaataagtgtgaccgccgtcatattacagagcgttttttatttgaaaatgaatccatgagttcatttcagacaggcaaatattcactgatatgaagcccgaactcgctggttttgcacttttgaaaacataaccgattacgtgcttaagcttctgaacctaagaggatgctatgggaaacacaagtatacaaacgcagagttaccgtgcggtagataaagatgcagggcaaagcagaagttacattattccattcgcgctgctgtgcagtctgttttttctttgggcggtagccaataaccttaacgacattttattacctcaattccagcaggcttttacgctgacaaatttccaggctggcctgatccaaagcgccttttactttggttatttcattatcccaatccctgctgggatattgatgaaaaaactcagttataaagcagggattattaccgggttatttttatatgccttgggtgctgcattattctggcccgccgcagaaataatgaactacaccttgtttttagttggcctatttattattgcagccggattaggttgtctggaaactgccgcaaacccttttgttacggtattagggccggaaagtagtggtcacttccgcttaaatcttgcgcaaacatttaacagctttggcgcaattatcgcggttgtctttgggcaaagtcttattttgtctaacgtgccacatcaaagccaagacattctcgataaaatgtctccagagcaattgagtgcgtataaacacagcctggtattaagcgtacagacaccttatatgatcatcgtggctatcgtgttactggtcgccctgctgatcatgctgacgaaattcccggcattgcagagtgataatcacagtgacgccaaacaaggaagcttctccgcaagcctttctcgcctggcgcgtattcgccactggcgctgggcggtattagcgcaattctgctatgtcggcgcacaaacggcctgctggagctatttgattcgctacgctgtagaagaaattccaggtatgactgcaggctttgccgctaactatttaaccggaaccatggtgtgcttctttattggtcgtttcaccggtacctggctcatcagtcgcttcgcaccacacaaagtcctggccgcctacgcattaatcgctatggcactgtgcctgatcagtgccttcgctggcggtcatgtgggcttaatagccctgactttatgcagcgcctttatgagcattcagtacccaacaatcttcagcctgggcattaagaatctcggccaggacaccaaatatggtagctccttcatcgttatgaccattattggcggcggtattgtcactccggtcatgggttttgtcagtgacgcggcgggcaacatccccactgctgaactgatccccgcactctgcttcgcggtcatctttatctttgcccgtttccgttctcaaacggcaactaactgaacatattttccgaataaagtgaggaatctgtaatgaaaaaaatcagcttaccgaaaattggtatccgcccggttattgacggtcgtcgcatgggtgttcgtgagagccttgaagaacaaacaatgaatatggcgaaagctacggccgcactgctgaccgagaaactgcgccatgcctgcggagctgccgtcgagtgtgtcatttccgatacctgtatcgcgggtatggctgaagccgctgcttgcgaagaaaaattcagcagtcagaatgtaggcctcaccattacggtaacgccttgctggtgctatggcagtgaaaccatcgacatggatccaacccgcccgaaggccatttggggctttaacggcactgaacgccccggcgctgtttacctggcagcggctctggcagctcacagccagaaaggcatcccagcattctccatttacggtcatgacgttcaggatgccgatgacacaagcattcctgccgatgttgaagaaaaactgctgcgctttgcccgcgccggtttggccgtcgccagcatgaaaggtaaaagctatctgagcctgggcggcgttagcatgggtatcgccggttccattgttgatcacaacttctttgaatcctggctgggaatgaaagtccaggcggtggatatgaccgaactgcgtcgccgtatcgatcagaagatttacgacgaagccgaattggaaatggcactggcctgggctgataaaaacttccgctatggcgaagatgaaaataacaaacagtatcaacgtaatgccgagcaaagccgcgcagttctgcgcgaaagtttactgatggcgatgtgtatccgcgacatgatgcaaggcaacagcaaactggccgatattggtcgcgtggaagaaagtcttggctacaacgccatcgctgcgggcttccaggggcaacgtcactggaccgatcaatatcccaatggtgacaccgccgaagcgatcctcaacagtagttttgactggaatggcgtgcgcgaaccctttgtcgtggcgaccgaaaacgacagtcttaacggcgtggcaatgctaatgggtcaccagctcaccggcaccgctcaggtatttgccgatgtgcgtacctactggagtccagaagcaattgagcgtgtaacggggcataaactggatggactggcagaacacggcatcatccatttgatcaactccggttctgctgcgctggacggttcctgtaaacaacgcgacagcgaaggtaacccgacgatgaagccacactgggaaatctctcagcaagaggctgacgcttgcctcgccgctaccgaatggtgcccggcgatccacgaatacttccgtggcggcggttactcttcccgcttccttaccgaaggcggcgtcccgttcaccatgactcgtgtcaacatcatcaaaggcctgggaccggtactgcaaatcgcggaaggctggagcgtggaattgccgaaggatgtgcatgacatcctcaacaaacgcaccaacagtacctggccaaccacctggtttgcaccgcgcctcaccggtaaagggccgtttacggatgtgtacagcgtaatggcgaactggggcgctaaccatggggttctgaccatcggccacgttggcgcagactttatcactctcgcctccatgctgcgtatcccggtatgtatgcacaacgttgaagagaccaaagtgtatcgtccttctgcctgggctgcgcacggcatggatattgaaggccaggattaccgcgcttgccagaactacggtccgttgtacaagcgttaatacattactccctgatgtgatgcccggtcgctccggctaccgggcctgaacaagcaagagtggttagccggataagcaatgttatccggctatattgcaggagcgattatgaaacaagaagttatcctggtactcgactgtggcgcgaccaatgtcagggccatcgcggttaatcggcagggcaaaattgttgcccgcgccagtacgcctaatgccagcgatatcgcgatggaaaacaacacctggcaccagtggtctttagacgccattttgcaacgctttgctgattgctgtcggcaaatcaatagtgaactgactgaatgccacatccgcggtatcgccgtcaccacctttggtgtggatggcgctctggtagataagcaaggcaatctgctctatccgattattagctggaaatgtccgcgaacagcagcggttatggacaatattgaacggttaatctccgcacagcggttgcaggctatttctggcgtcggagcctttagtttcaatacgttatataagttggtgtggttgaaagaaaatcatccacaactgctggaacgcgcgcacgcctggctctttattagcagcctgattaaccaccgtttaaccggcgaattcactactgatatcacgatggccggaaccagccagatgctggatatccagcaacgcgatttcagtccgcaaattttacaagccaccggtattccacgccgactcttccctcgtctggtggaagcgggtgaacagattggtacgctacagaacagcgccgcagcaatgctcggcttacccgttggcataccggtgatttccgcaggtcacgatacccagttcgccctttttggcgctggtgctgaacaaaatgaacccgtgctctcttccggtacatgggaaattttaatggttcgcagcgcccaggttgatactagcctgttaagtcagtacgccggttccacctgcgaactggatagccaggcagggttgtataacccaggtatgcaatggctggcatccggcgtgctggaatgggtgagaaaactgttctggacggctgaaacaccctggcaaatgttgattgaagaagctcgtctgatcgcgcctggcgcggatggcgtaaaaatgcagtgtgatttattgagctgtcagaacgctggctggcaaggagtgacgcttaataccacgcgggggcatttctatcgcgcggcgctggaagggttaactgcgcaattacagcgcaatctacagatgctggaaaaaatcgggcactttaaggcctctgaattattgttagtcggtggaggaagtcgcaacacattgtggaatcagattaaagccaatatgcttgatattccggtaaaagttctcgacgacgccgaaacgaccgtcgcaggagctgcgctgttcggttggtatggcgtaggggaatttaacagcccggaagaagcccgcgcacagattcattatcagtaccgttatttctacccgcaaactgaacctgaatttatagaggaagtgtgaaatgctgaaaacaattagcccgttaatttctcccgaactattgaaagtgctggcagagatgggacatggagatgaaattattttttccgatgctcactttcccgcccatagcatgggaccgcaggtgatccgcgctgatggcctgttggtgagcgacttgctccaggcgattatcccgttatttgaactggacagttatgcaccgccgctggtgatgatggcggcggtagaaggtgacactctcgatcctgaagtagaacgacgttaccgtaatgcgcttagtctacaagccccgtgtcctgacatcatccgcatcaatcgttttgcgttttatgaacgggcgcaaaaagcctttgcgatcgttatcacaggcgaacgagcgaagtacgggaatattcttttaaaaaaaggggtaacaccgtaatctcataccggtacgcccgcatgacgcgggcggttatcgaatgatggggtgaaaaatatgaaagcggcacgccagcaagcgatagtcgacctgctgctgaaccataccagcctgaccacggaagctctctctgaacagctaaaggtcagtaaagaaaccattcgtcgcgatctcaatgaattacagacgcagggtaaaattctgcgcaatcatggacgcgctaaatatatccaccgtcaaaatcaagacagtggcgatccctttcacatcaggctgaaaagccattatgcgcataaagcagatatcgcgcgcgaggcgctcgcgtggattgaagaagggatggtgatagccttagacgccagtagtacttgctggtatctggcacgccagttgcctgacatcaacattcaggtcttcaccaatagccatccgatttgccatgaactcggtaaacgcgaacgcattcaactgatcagttccggcggcacacttgagcgcaaatatggctgttacgtcaatcccagcctgatttcccaacttaaaagcctggaaatcgatctgtttattttttcttgtgaagggatcgatagcagcggcgcactgtgggactccaatgcgatcaacgctgattacaaaagcatgctattaaaacgtgccgcgcaaagcttgttattgattgataaaagtaaatttaatcgtagtggggaagcccgcatcgggcatctggatgaggtaacgcacattatttctgatgagcgccaggttgcaacttctttggtaacagcctgacggaaagggtagcaggccggagacgacgccccggccttgcctgttatcgctcgtcgcgacgaccacccaccgcagcccagatgcggcggacgtgcaccgtcacttcttcgcgatcgtgatacaactgccgcgcctgaatctgagcatttatgccatgttcatcaagctgtgcctgaatatacgccagattgtgactcacttcttcgtagcgttttttcatcggcagtttgaggttgaaaatggtttcacggcaccagccattaaccagccactgtgccatcaatgccgcaactttcgccggtttttcaaccatatcgcataccatccaggagatattgctgcgcgtcggacggaatttgaaaccgtcttcccgcagccacgtcacctgtccggtatccatcagactttgcgccatcgggccgttgtcgacggaataaacccacatgttgcgcttcaccagttggtaggtccagccgccagggcaagcgcctaaatccaccgcccacatcccgttcgccaggcgttcatcccactcatccgcaggaataaacacatgaaatgcctcttccagtttgagcgtggaacgactcggcgcatctgccggaaatttcaggcgcggaatgcccatatagaacgggctattattgttgctgtaactgtaaccggtatagcagcagcctggtgcaataaagaatacatgcacaaccggacgcttcggcgtttcatagttcgccagcaccccggcatcgcgcaaggcagcgcgtagcggaacagtaaatttacggcagaatttcagtaactctttgctttcgttggtatcggcaacttcaacacgcagttcaccgcccttctctactacgccctgtaacatgccgacaatgggggtaatacgatcttctggcggcaaatgctgcaggagttcccccaccacaaaccactggcgggcaaaaattaaactactgaacggcagctcacggattaacttatcgccatcatcaggttgataacattcataaatgacataacccgcattctctttcacgcgggcaaaaccgaaaatttcccgctggccggctttatcggtaatttctgcggcgcactctttttcaaagcccggacggcacagcaatacaaccttattcatgacttacgcccttgcgctttaaacggatagcaccaactaacattaacgcccagcccgcgaggaagctcacgccgccaaccggagtgacaaacgcccacaaacgcagatgggacagcgccaggcaataaaggctgccgctgaacaacaccgtgcctaacgcgaggaaaacgctactccagtaaaaccagatactgatgcgacgctgcattgccaccgccagacctaagatcgccagcgtatgaaacgcctggtattcgaggccggtctggatccagcccatctcaacggcccccatggttttacttaacacatgcgcgccaaaagcgcccagagccacaaaaatgaagccgctaatggcggcgaaaatcagcataaaacggctggtcatggtcgtaccctacgtaaattattgttcataacgaaagcggaatttttcttgttcagcagcggctttcgccaggatccattggcgaaaggcggctattttacccagttctgcctgactgtcatgacaaaccagataaaaagcatttttactgaccagaacatcattaaacgggcaaacaagacgtccggcctcgatttcagattgcgccatcacgttatttgccagcgccactccctgcccgtggatagccgcttgcagcaccatggcgctatggctaaaaattggcccttgctgaacgttgatatgatttaaccccaactgtcgggtatatgtctgccagtcacggcggctagcatcatgtaataacgtatgtttagccagatcttccggtgtcttcaagggtttttcgccagtcagcagtagcgggctacacaccggcaataaatattcggcgtacagtttttccacccgtagccccggccagttgccccgaccataaaatatcgccacatcaacatcatccgccagcttatcttcctgacgatcaaccgcctggattcgaacgtcaattcccggataagcactattaaagctggaaagtcgcggaaccaaccaatgaatggcgaaactggggagtaaactgaccgtcaacgcccccttggcgctacgggcctggagtttacgcgtcgcttcggttaattggctaaatatctctttgatatcgaggaaatagctttgcccttcctcggtcagcaggagactacgattacggcggcggaacagttttagccccaaaaaatcctcaagagacttgatttgatgacttactgcggcttgggtcacaaaaagctcttctgctgcgcgagtgaaacttaaatggcgtgctgcggcatcaaaaactcgtaaggcatttagcggtggtaatcgtttagacatggctattaaactttgatgttaaatgaatttaacaattagatcacactatgtaacctattagtttttttaatctgagccattataaattgtccgttgagcttctaccagcaaatacctatagtggcggcacttcctgagccggaacgaaaagttttatcggaatgcgtgttctggtgaacttttggcttacggttgtgatgttgtgttgttgtgtttgcaattggtctgcgattcagaccatggtagcaaagctaccttttttcacttcctgtacatttaccctgtctgtccatagtgattaatgtagcaccgcctaattgcggtgcttttttttaccttgcgatcgcgaattactgatccagttcgaccatctctttcacgtcagtacggttgatctgctgtttgttgccattagcgtctttatagctaatcataccggtatcgttatcagtctgtggtttgccgtcagagacgatggtacgtccgtcattggtgtgcatcacatagttgctaccggaacaggcgctcagggcaaaagtcagcatacaggcagaaataattgcggcagtctttttcatcatcttctccttaaagcgattaataaatcttaatagtattgattaacaggctaaaattaacgcctaacactattcagcatatgttacttacgcggcttcgccaggatatccagataattctgatggttagcactctccttgtatcaaagtgaattttgcgtcacgatcggtgcatcaagccgaggagtaccatgaacgtttttaatcccgcgcagtttcgcgcccagtttcccgcactacaggatgcgggcgtctatctcgacagcgccgcgaccgcgcttaaacctgaagccgtggttgaagccacccaacagttttacagtctgagcgccggaaacgtccatcgcagccagtttgccgaagcccaacgcctgaccgcgcgttatgaagctgcacgagagaaagtggcgcaattactgaatgcaccggatgataaaactatcgtctggacgcgcggcaccactgaatccatcaacatggtggcacaatgctatgcgcgtccgcgtctgcaaccgggcgatgagattattgtcagcgtggcagaacaccacgccaacctcgtcccctggctgatggtcgcccaacaaactggagccaaagtggtgaaattgccgcttaatgcgcagcgactgccggatgtcgatttgttgccagaactgattactccccgtagtcggattctggcgttgggtcagatgagcaacgttactggcggttgcccggatctggcgcgagcgattacctttgctcatagtgccgggatggtggtgatggttgatggtgctcagggggcagtgcatttccccgcggatgttcagcaactggatattgatttctatgcttttagtggtcacaaactgtatggcccgacaggtatcggcgtgctgtatggtaaaagtgaactgctggaggcgatgagcccctggctgggcggcggcaaaatggttcacgaagtgagttttgacggcttcacgactcaatctgcgccgtggaaactggaagctggaacgccaaatgtcgctggtgtcataggattaagcgcggcgctggaatggctggcagattacgatatcaaccaggccgaaagctggagccgtagcttagcaacgctggcggaagatgcgctggcgaaacgtcccggctttcgtagtttccgctgccaggattccagcctgctggcctttgattttgctggcgttcatcatagcgatatggtgacgctgctggcggagtacggtattgccctgcgggccgggcagcattgcgctcagccgctactggcagaattaggcgtaaccggcacactgcgcgcctcttttgcgccatataatacaaagagtgatgtggatgcgctggtgaatgccgttgaccgcgcgctggaattattggtggattaatgacaaacccgcaattcgccggacatccgttcggcacaaccgtaaccgcagaaacgttacgcaataccttcgcaccgttgacgcaatgggaagataaatatcgccagttgatcatgctggggaaacagcttccggcattgccagacgagttaaaagcgcaggctaaagagattgccggatgcgaaaaccgcgtctggctgggatatacagtggctgaaaacggcaaaatgcatttctttggcgacagcgaagggcgcattgtgcgcggcctgctggcggtgttgttgactgccgttgaggggaaaaccgccgccgagttgcaggcacagagtccactggcattgtttgatgagctgggattacgtgcgcagcttagcgccagtcgcagccaggggttaaatgcgttaagcgaggcgattatcgctgcgacgaagcaggtttaagcacagaaccgggtcggataagacgttcgcgtctcatccgacctgattgtttaaccctgacgcgccgctttcgccatcatcttcttcagcgcatgagaaaccgcaacaaacccaaaggtggcggtcaccatcgttgccgcgccaaatccagatgcacaatccatccgcttcggcccttctgccgtggctttcatcgcacacaccgtaccgtcactctgcgggtacaccagcgcttcagtagaaaacacgcaatccacgccgagcttacctttactgtttttcactacgccaaaatcgcttttcaggcgctcgcgcaacttcgccgccagcgggtcctgaatcgttttcgccagatcggtaacctgaatctgcgtcggatcaatctgcccacccgcgccaccggttgtgaccagtgggattttattgcgccgacaataagcaatcagcgccgctttgggccgtacactatcaatggcatcaatcacgtagctataacccacgctcatatactgcgctacgttatccggcgtcacgaaatcatccaccaccgttacacggcactccgggttaatctggcgaatacgctccgccataacttccgcttttgccagcccaacgttatcgcgcagggcatgaatttgccgattggtattggtgacgcacacatcatccatatcgataagcgtgattgcgccaatccccgtgcgcgccagcgcttccgccgcccaggaaccgacaccaccgataccaaccacacaaatatgcgcgtcagcaaacagttgcaacgctttttcaccatacagacgcgctgtgccaccaaaacgctgacgccatgcatcactaattaccacagacatagcacctcagaattaaaaagggcgaggttatccctcaccctaaacgcataaatgcctgatgcgctacgcttatcaggcctacataactcctgcaatattttggatttgcatgatttgtaggccggataaggcgttcacgccgcatccggcatgaacaacgcgcacttagtcaataatcaggatgtgaggttacccctcaccctgtcatatccgtaaaaacggcatacagaatatcacatcagccgctaaagacgttacctgcgcccggggcggttttcagcacccagacacgtccatagtggttgtaccaacctgcgcggtgtccggcttccggcccgatcccttgatagatatcgaagtgttggcctttgattgcaccaccgacatccagcgccaccatcagacgcagttcgtactgaccattaaatttgccgttattatccagcaacggcacttctgccagcaaggtagtacctggcggaataatggaacgatcagaggcaacactcgcgcgaccaaccagcggcaccgcacttgcccctttcaccggagcaaaagattgcggtttaaagaagacgaaagacgggttctgttccagcagctcgcgaacctcggcttcactgtgtgtttcgccccagtgacgaatcgcctgcatgctcatatcttcttttttcacttcgccacggtcgatcagcaccttaccaatgctgcgataggcatgaccgtttttccctgcatagctgaaaaagttaagcggactgccatcaccaaagtcgatatacccactaccctgcacatccataatgaagttatccatcagggagttactgtaagcgagaatatatttatcactcaatgcccccgcgtagatctccgcacgagacggcagacgaccacgttttggcggcatacggtaaataggatactggaactcgccctggcgggtatggcgcgcctgaattaccggcgtgtaataaccggtaaactgcacgttaccatagttgtcggcaccttccatctgccaggcatcaatgccgaactggcgcatattgcgggtatcaccgcctgcgcgcagccactcttgcaccgcgttataaacattactctggttgccatacagacgcggactgctattacggatatggttaatttgctcggcaaaatcaccggcgttaatcggcgcgccaacggcatctggctggttcaccagagagaaaggctgggtaaatttcccgtctttatattgctgtccgcgatcggttggtttggaagagcaggcggcaagcattgccacaaccgtgcccataagaaggtactttacccaacgtcctttcattgttctcttcttcaggttaaaaaataaggcgcaacgaagataacaaaccgccgcgtttaatgaaatgagcagcctctccctgacgcaaattttgcacaaaaaataggctttagtgatttgtttttgttcaaaatcatgccaaatccgtgatcggggtaaaaaaaaggttgcatgaaaacgcgagcggagtatagtgcgcatccacggacgcggggtggagcagcctggtagctcgtcgggctcataacccgaaggtcgtcggttcaaatccggcccccgcaaccaattaaaatttgatgaagtaaagcagtacggtgacgcggggtggagcagcctggtagctcgtcgggctcataacccgaaggtcgtcggttcaaatccggcccccgcaaccaatcaaatttgatgaagtaaaagcagtacggtgacgcggggtggagcagcctggtagctcgtcgggctcataacccgaaggtcgtcggttcaaatccggcccccgcaaccaattattgaacaccctaacgggtgtttttttgtttctggtctcccataaaaaagcgccattcagcgcctttttatcatccccttctcgccagcgtcgccccatcggcaaaatacgctttaatccccgcaagaatagactccgcaacttcctgctggaaagtcgccgttttcagtttacgctcttcctcaacgttactgataaacgccgtttcgaccagaatggagggaatatctggtgcctttagtacggcaaacccggcctgttcaacttgatttttatgcagcttgttgattttaccgagcttattcagtaccgctttaccaaacttcaggctgtcggcaatggtcaggctctgtaccatatcgaacatggtgtggtcgacatagcggtcaccgcttttgctcacgccaccaatcaagtcgctggcgttctgggtttgtgccagatattttgccgcagtactggttgcacctttggtactgagcgcaaacacagaggaaccgctcggctgacgactggtaaaggcgtcggcatggatagagacaaacaggtcagcacgctgtttctgggcttttgctacgcgcacttgcaatggaatgaagatgtcttcattgcgcgtcatgtacaccttcatattgccctctttctcgatcagagagcgcaaacggcgagctatttgcaataccacatctttttcgcgcgttttgtatttccccaccgcaccggagtcttcgccaccgtggccagggtcaagcataatgacaatcggacgatcgcgccctgctttacccggttgtggaccactttgcgctggcggcacctgcttttcgaggtcgcctttgttgtaatcctccagcagcgccagcagcgggtcctgcatatcctgtgcattggccggatagaggtccatcaccagacgctctttaaacccggcgaccggcgcaagggcaaacagctgcggttttacgttttgctttaattcaaaaaccatccgtacggtttgcgggtcaaattgcccgacgcgcgcgctcttgatgaacgggtcgtctgcacgaatttgtgccgccatccccttgagtacgctgttcaggtttacatcttcgatatccaccaccacgcgttcagggttactcaacgcgaactgcttatatttcagctgacgattactttccaccgtcacgcgggtgtagctggacgcaggccagacgcgcaccgccacgacctggctgaccgcagccagactgacctgacttacgctcaatagccacatggcacccgcgccttgcagtaaacgacgacggctgattgcagtgttggatccactcatgcctctcccgagcaaaagaaatctaagctgtgtaacaagtaaacgactaatttgaccggaaactttagcgaaagacgcataatctgtcatctaataaacggtaaacattctttttatattcacggcattactgataaaaaagtcgctctcgcataaaatttacacttgcaccctgcgaaaaaacagaataaaaatacactaatttcgaataatcatgcaaagaggtgtgccgtggtaaaggaacgtaaaaccgagttggtcgagggattccgccatagcgttccctatatcaatacccaccggggaaaaacgtttgtcatcatgctcggcggtgaagccattgagcatgagaatttctccagtatcgttaatgatatcgggttgttgcacagcctcggcatccgtctggtggtggtctatggcgcacgtccgcagatcgacgcaaatctggctgcgcatcaccacgaaccgctgtatcacaagaatatacgtgtgaccgacgccaaaacactggaactggtgaagcaggctgcgggaacattgcaactggatattactgctcgcctgagcatgagtctcaataacacgccgctgcagggcgcgcatatcaacgtcgtcagtggcaattttattattgcccagccgctgggcgtcgatgacggcgtggattactgccatagcgggcgtatccggcggattgatgaagacgcgatccatcgtcaactggacagcggtgcaatagtgctaatggggccggtcgctgttagtgtcactggcgagagctttaacctgaccagcgaagagattgccactcaactggccatcaaactgaaagctgaaaagatgattggtttttgctcttcccagggcgtcactaatgacgacggtgatattgtctccgaacttttccctaacgaagcgcaagcgcgggtagaagcccaggaagagaaaggcgattacaactccggtacggtgcgctttttgcgtggcgcagtgaaagcctgccgcagcggcgtgcgtcgctgtcatttaatcagttatcaggaagatggcgcgctgttgcaagagttgttcagtcgcgacggtatcggtacgcagattgtgatggaaagcgccgagcagattcgtcgcgcaacaatcaacgatattggcggtattctggagttgattcgcccactggagcagcaaggtattctggtacgccgttctcgcgagcagctggagatggaaatcgacaaattcaccattattcagcgcgataacacgactattgcctgcgccgcgctctatccgttcccggaagagaagattggggaaatggcctgtgtggcagttcacccggattaccgcagtagtagtaggggtgaagttctgctggaacgcattgccgctcaggcgaagcagagcggcttaagcaaattgtttgtgctgaccacgcgcagtattcactggttccaggaacgtggatttaccccagtggatattgatttactgcccgagagcaaaaagcagttgtacaactaccagcgtaaatccaaagtgttgatggcggatttagggtaagcgatgaaaatcgtcggatgcgacatgcgtaacactcgtacgtcgcatccggcaattacgtttattcccgactactaaacaacgccgccagaccactgcgccgctcagtacgagtggcgattgccgcacttaatatgcgctcatcggcatacaggctcagacggcgacgcgcgcgggtcaccgcggtataaaccagctctcgcgttactaccggcgtgcgttggctcggcaaaatcaacgccgcatggtcgaactcgcttccctggcttttatgtaccgtcatcgcccacgtagtttcgtgctctggcaagcgactcggttgcacagacttaatattgccgtccggcatcgcaaaccagacgcgcgtcccctgcccgcgatccagcgcaataccgatatcgccattaaacaacccaagcgcgctgtcattacgggcaatcatcaccggtcgaccttcgtaccaacgagagtgcggatgacgatgaattttgcgcttctgttgcataaactgctcaattcgctcattcagtccagccacgccaaacggcccttcccgcagggcgcacaaaagctggtactcattgaacgcctgaatgattaaatccggctcggcacgcgcttgcagcagatccagataacgtccgtaacccgcaagagcttcctcaagcatcgcaatataatcttcgccgctctgtaaaagccgtttttcgatatcagtaaaatcctgctgaaaaacggttttcactgccgttttatcaccacggttgatcgccgcagctaactgaccaatgccagaatcgctgccgaaacgatagcttttttgcagcaggcagagactgtcgcgcaaagatgccgcttctgtgccggttcctgccggaacgtgagtccccgtcaggcggcttagctgcctggcacgctcggcggtaaagcccgcgttggcataagcgcagatatcgcccagcacagccccagcctcaacgctggccagttgatcacgatcgccgagaaagatcactcgcgcatgatcgggcaaggcgtcgatcagtctgctcatcataggcagatcgatcatactcgcttcatctaccaccagcacatcaagatgcagcgggttaccggcatgatgacgtaaacgctggctacccggctgcgcgcccagcaatcggtgcaaagtgctggcatcttccggaatgcgtttcttttgttcatcggtcagcggtaactgtcgcaaagccttgccgagagattcggttaagcgcgcggcagctttacccgttggtgcagccagacggatacggcagcgttcgccgtcggccatttgaattaacgctgccagcaacttcgctacggtggtcgttttaccggtgccagggccgccggaaatcacgctgatccgccgcgtcagcgccactgccgccgcaactttttgccagttaatttcatcgcttactggaaaaagtttgtccagggtttgcgccagtagagcttcatcaacctcaatggcatgattcacttcgttgaaaaagcgtgccactgtgcgctcgttacaccacatgcgattcaaataaagacgatcgccacagaggatcatcggcgtgggttcatctcccctgctgaccgcttgagaagccagcaagcattcttcccaattttgtagctcaccgatttcactgacacaggtcgccaacagcggatggctcgcctcgttattttccagtcgactaagcggcaaacaaacgtgtccctctccggcatcatgacttaacagtgccgccgcgagggtgacggcaggatgttcatctcccgccacggtcagggcaaattgcacatccagcgggcgtagctgtttgtgctccacagcttccagtaattgcttttgcaatttcattacgcctcctccagggtcataccggcaaacatctcatccatcagggcaatcaacccggcgttgggtcgggttgtgtaaatcccctgttgcggatgttctttatcaacgccacgcaggaacagataaataacgccgccaaagtggtgctcatagtcgtaatcagcaatgcgatggcgcagataacgatgcagcgccagggtataaagctgatattgcagatcatagcggtgtgcctgcattgccgctgccatagcctgttgggtgtaagcgctactgtcttcacccaaccagttggatttatagtcgagcaggtaataacgcccttcgtggcggaacaccaggtcgataaagccttttaacatgccacgtacctgcatgaactccagcggcgggcagcctgcggatagcgggtcaaactggcggattaacgtatcaagctgactggcgataagcggttcactaatcggcagataaaactccatctccacctgtttattgcgggcggaaagttgactcaggcttacgccggtttcattgagaggtgcctggaggacagccgtgatccactcggtcaataccggttcccactggctttcaaagccgccgagttccagtttttcccgcacccagttcgggtcaaccggctgggtaaaatccaggtcttcaaacaaactgtgcaagaacgtccccggactcgcaccgcgcggaaactgatgtggtgttaacgtcggttcttcaacgacgctggcaacgcctgcagcatcgacatccagccgaggcatcaaatcctgggcgataccgtgaccacgctgttgcaaaccagagtagctggtgacgcgccagttatcgccgggcaatcgttgtaacgtcttcgcattcagctctgctgtagaaacatcattaacctgccagggttggttatcaccagtttgtgccgtttgccaggcaatatcatcatcgcataacgcttcaatacaggtgcgaagccctgccgcatcttgcggttcccctttttgcagcaaacgcccgagcgcactttggtggacgtcggtgtcaccttttttatcgccacgacggcgcaccagcggtgcaacgccgagactgcaatgccaaacgctacgtgtcagcgccacgtaaagcaaacgcagatcttccgccagacgttcggcctccgcgaggtcgacgctttctggcgcagcattaagatccagaactgcctcaaagctgtggcgatcgtgataaaacgcctgctcctggacgcggaaattggtgataaacggcagccagaccaatggatattccagccctttgcttttgtggatcgtgacaatctgcaccagatgtttatcactttcgagacgcatttgttggctggaggcattactgtctggctcgaggatatgttggcttaaccagcgtaccagcgcatgttcactttccagctgcgttccggcttcttgtagcagttcgctgatatgcaagatatcggtaagacgccgctcaccgcctgccgttgccagcaagttttcagcaatgttacgcgcgctcatcagcgcccgcagcatcggcataacgccacgtttgcgccagatttgccgataaccatcgaactcttcgactaccacatcccacgcatgttcgtcattgttcagcgtttcgatatccagcgcgttcagccccatcatactcgttgccagcgcactacgcagggtgttctcacgttcgggcgtcatcaccgcctgcaacaaccaaagcatttcctgcgcttccagagtttcaaaaacactgtcgcggttgctaaggtaaacggaagggatttccagcaacgttaaggcatcgcgcacctgggcggcctcctggcggctgcgcaccagcacactgatgtcgctagcacgcaccggacgcgcgtcgtcgccgttcatcagcaacgcttcgccccgctgtccggcttgtagccagtcgcggatttgcgcagcacatacctgcgccatggtactttgataatcgccaacgccgcagctttcgccttccatcagccacattttcatcgcaggctgtgtttcacctttaaatacaaaacgtaacgcctgatttttcccggcacttttcactggaataaacggtatttcgcgaaacatgaacgcgtcatcagtctggctgaaaagcttattcacgctgttcaccattcctggtgcggaacgccagttggtgtctaaagtgtagtgggcgtgaacttcgctacgcgccttcatataagtgaagatatccgcaccccggaatgcatatatggcctgcttcgggtcgccaattagcaacaatgcggtttccggctgatggtgccagatacggcgaaaaattcggtactgctgggggtcggtatcctgaaattcatcgatcattgccaccgggaatcgcgtacggatcgccgctgccaacacctcaccgctttcgctacgcagcgcggaatcgagccgacttaacatgtcatcaaaacccaattcgccacggcggcgtttttcacgcgctactgtttcgcggatctcagccaatgcgcgggtgatcaccagatcgcggatgctcaatggttctgcaagcagttgatcgatcgcctcaaacagtggatgtcgcggggtttcccccccggccttcgtgcgatcttctaagaaacgctgggagaatttttccaggctctccggcaactgataactgtttgtctcttcttctgcccaggcgctgatcttgtcgatccatttagcctgattgctacggttaaacttgcgtcgatcaataccagaagattcgatcagcgcatccagttcacccactgcgtcgcgccactgctgttttaccgtatcaatacgcgccacaatttgcgcgtgacgggaagccagcgtttcatcatcgggcggcggtgctttgataaccggcgcttcgccttgcagataacgattaatatcgcgcagcaacgcctgcggccctttccaggtttcaaagacgacctgggctatttcacgcggcagcgggtagcagtggcgacgccagaaatcggcgcaggcctggtagcgtagcagagactcatcttcaatcagctgctgctcaaacagcatgccggattcaaaggcattcaggttgagcatgcgctggcaaaagccgtgaatagtaaagactgccgcttcatccatctgccgttcggctaacaacaaccactgcgcggcttgcgctttatcgtcgatctcttccagcaggcgttcgtacagtggattgtcggtggtttcacgcagacaggcgatgcgcaactcgtggatattgctacggatacgaccgcgcaattctgccgtggcagcctcggtaaaggtgaccaccagcagttcttcaacggtcagcgggcggggaaaggcggcggaaccgcctagtccaagtaacaggcgcaaatagagcgccgcaatcgtaaaggttttgcctgtgccggcagaggcttcaatcaggcgctcaccctgtaagggcaagcgcaaaggatctagtgtctcggcgacatcactcattcttttcactcatcaggggcattgtttgctgcaacgcgctgacgttctcccacactttccagccttcagggtgtacatattcggctttcccgttctggctgccggaaatctggctcagaatagccatgccttgcggctcgaccaccgcctgatggaagaaatcagcaagtttttgcggcgtcagcagttttatctgggccacgattttatcacggctatcgaagcgcatattgccgcgatcgaaatctttacttaacttgcttgcttcttcgccgagcgtttgcggtgcctgcagcatctgggtaattaccgcctgctggatttgcgcaaactcatctggcttcatcgctcgcaattttgcctctgcggttgggaaaaacgccttgtaacgctcccacaagaaactaggctgtttatcattgctttgcaaaaggaagcccatgccccactgacgccccacgctcattggaaacgcaaacacggcatagcccaattgttcttcggtacgcaactgattgtagaaccacggctgtacgatctgccccaacagagagctataggcactgctggtgtattcatcgtagccagtcggtacaaataccgctgccagtgcggagtcggtgctgttaccggctttttcaaagatgacggattgttttttatcgaccactacatctttgtttcgacaccactcactaccatcagcgcccaactgtttttgcacatcgcgtgccagcgttgttgcctgggcctcggtcatgttgccgataaccataaactctggtcgagccccactttttaaggcgtcgcgataggccagcacctctttcaacgtaatggagggcaaaattttacgccgttcatctcggctgaagtacggcacttggctgagcatctgcgcgggcataatcgcctgctcaaacgctttacccttttctgcggaatccatcatctggttataccaggacttcgcctgctcaagctgatcttccgtagcggtatagctaaagtacccctcgagcaatgcctggaacagctgcggcagacgctgggtgtaaccattagcattaaccataaggccgttgttagcgttggtggaaaaacttatgccaccaacgctcgcctggttgcttaactgatcaagcgccagccctgcgagataatcattgagcgcaaacatcacctgattgcgggcgctgtccatggctttcggattacgcaaaatcaggctgacatcagctttgggctcgctggcaaaataacggcttggcgcatacaccacgcgcagattgctctcatcaacaatcagctctggatggtcgtatttcttctcactcttaatcaggctgaaatcatcaggaatataagggttaagctctggcaaagagagcgcaatgtcggcggcttttttctgccagtcggcgaaagtttgtgcgctgattttatcgacctgatacggcgcatcgacaaagtaagccgttttgttgtgcggctctttcgggctgatataccagatacgcgcattctgcggcgtcatcatcgccagacgttcctttactgctttagcatcgtaccgatcggcaatattgactgcatccagcgtatgctcaacaggaacgcgaatcatggtatctgccagccattcgacgtaatccatatcacgggtgatgctcggataacggaagtcgatatccagcacattcgccagttcatcgaagtattgtttatcaatgcctttttcacgtaacagattgagatagctaaaaattgccgccacaacctgatcgcgattagccaggcctttatcggttaaagacgcagagatcgctaatacgccgctgttgccgttgacgataggatcggagttggcgctaatgccctcaactaatccctgcttttgcagccagtcagaaagtgtacctgggctgcgattgccaatcagataggtaatcaattcatcggttttactacggaacttcgcactgttgttatcgatgcgaaactcaacgcgcaacactttacgcggcagcgcagggacgtaatgaatgataatgcccttttgcgcgtcggtgactaccggcacggtgatttccggttttttgctctctttgttcggcacgcgaccaaaggtgtccgccgccatttttgccaactccggcagcggtttattactgtaaataaccgccttcatcaaattggcggaatagtacttctcgtggaaatctttcagcgcctgctgcaccggattaccaggtttgtcgcttaaagtttcgaggttaccaccagaaaacttactaccggggtgtgccgggttaatggtttctgcgctgacctgtgccatgcgcatcccgtcacgcgtacgcgccatggttaattcagcgttcaccgcattacgctcacgttcggcatatttcttgtcgagcaaaggttcagcaatagcatcggccaggcggtctaccgcaccaggcaaggcgtcgttctcaacttccagatagaaagccgtgcgatacggcgcagtgctggcattgtgactaccgccgtgcattttgagatattcggccagactgtcagcctgcgggtactttttgctccccatcagactcatatgttcaaggtaatgtgccagcccctggtacgcctcgggatcttccaggctcccaacgggcaccaccagcgcgctgaggcttttaactgcctgcggatcagaaaccagcaagaccaccataccgttatccagacgtatagcctgatactggcggttatctttatcacttttacggatggtttcctgaatcggctgccatcccgtttctgcctgacttaagggtgcccaaagggcaactaacaacaataatgctttgaaccaggtgctgcggggcattcacggacctcataatcaacttaattttctgtccagattcaacacgttaacgcaaatcatctgccagaatttaatcttgtgctgcacgagtcagcctatgtttatataaccatcagtccgtgactggtgcgcatcataaagtaagcggatagattgcgcaatttttatacagcactcaactctgattaaagcgaaacagcggtaacaggaaacgttggctctgttcaacgatggcctccattgtctctggtgttaattgccgccagagcctttgataccagatatcatcaccttcgccacgcaccatcatgttgccttcgtaagcctgaaggaatttcgtacgggctttttgcaacgtggaatcgtcatccagcatggcatcgttttgcgcgtcataacaggtttttagccacgcgccgccactttcaggtaacaccagcaatggcgcggacattccttcacgatacccctcaatcagttgactgaggtaatgcaaagcctgttcggctgcaagcggcggaaaacgccactcgccgtctttgcgtagaaaaaggcgactttcaccattaccaccgctggcacagtagacaaggtgttccagccaaagttgcattccctgggccacacttaataaagagggacgccagcgcaacaggccatccggctgcacctgcggcaaccagccagttatctgcacaccgttgcaggcgagatcaatttccatactctgccccggctggcgacaggcaatgactctgtcggcaagctgctgcatctcctggcactgtgtttcccagaaaatttcaccaaaagcgccatacggtaaatcccctgccgctcggaagcggcggaacaagcgttcggcatcatcctgctcaaccagtgcattcaataactgctgattgatttgataacggctaagtccttccagaataaatggctcggtgtcggggatttcgctgtcttcagtacggaagttcacctgcaaacgcatctggaaaaatgcccgcaccggatgtgcccagaatcgttgtagcgtttccagcggcacggtttccggtaaggtaaacggcagcggctgaacaaattcagaatgtgctttaccagcctggctggccgcaggtagccattcacgagcatagctttgtcgttcgcctggctggtagttttgtggatcaaacggcatccgggtatggaggcaagtaagatgcgcttttacccttgcctcgctttcatcacagttgagcgcttcatcgcccggtagataatgactttgcccgatgtagtcgatcagttcctgcaccagtacgctcgggaaacgctcactgttatcctgaatggaacgaccgatatagctgatatagagtttttgctgcgcggaaattaacgcttccaggaacagatagcggtcgtcatcgcgacggctacggtcgccacgcttcggtttctggctcatcaggtcaaagcccaatggcgcaagctgacgtggataaacgccgtcgttcattcccagcaggcaaaccactttgaacggaatactacgcattggcatcagagtacaaatgttaaccggtccggcgagaaaacgctggctgatacgttcttgatccagacgctgtgccagttcatcacgcaatagactcagcggcaccgcgtcgccatactgcgcacctaaaccttcggcgataatcgcctgccattgttgttcgatcagcgtcatcgccgcttcggtttccgcatccggcaggaagaaggcgttgagcatatcgcgacaaaccggcaaccactcttccagcggacgctcctgtgccagcccgcgacgccagatgtttagctgcattagcagactagccagatgccccaccagttctgcaattaagccgctgctttcatcataaggtagaacgctttgccactcgccctgcgcgctctccatcgcgtagcccaacaacatacgcgtcaggccaaatcgccaggtgtgttgtccggtggcggggagttccagctcgcgaacgttgtcgtcatctatgccccaacgaatgccggattcgttgacccactggcgtaaataacgcagcccttcttcggtgatgtcaaaccgcgccgccagcaccggcacatccagcaacgccagcacatcctcactcacaaaacgactgtcaggcagacttaacaggctgataaacgcttccagtaccggatgactctgccgcgcacgacggtcggaaatggcgtaaggtaggtaacgatccgcaggtgcgctaccaaacacagcctgaataaacggactgtagctgtcgatatcagccaccatcacgatgatgtcgcgcggagtaagtgtcgggtcttcctccagcatcgccagcaggcgatcgtgtaaaacttcaacttcacgctgcgggctatggcaaacgtggaaggtgatactgctatccagtggatcaagcgggcgtttgttatcgctacgggaaaactcttcgatgttcacaccagcaacggcgcggttttccagttccagaatgtcagactgaatgttatgcagcaggttatctggcgtgacatcgacaaaggcgtccagctcctggctgctctccaggtcagaaaggagataaatgtagtcgcgcccaagcttaccccaactagccagcagcgggttgccgacatcctgttcaccatcgctgttaaagagctgcccggcattttcgctatcacgaaatagcggcaattcgcgatcttcaaaactgtgtcgacgctgacgggtcagcagtttcgccagataagcaggatctttaatatcgccccagtaataacggcaggggttggtaaacaggagatggatttcaatatgtttacccagcgcctgtagcgcctggagataaacaggcggtaacgcggaaataccgcatataaagacgcggctaggtaaccccggcgggcaggtcgtcgcggactccagcgtttcgataaagcgctgatagagattggcgcggtgccagcgcggttgcccgagttgatgggtatattccaccagcgccttccacaacggggcttgccaggcctgtgcttctcccagcccttcaaccaaatgtcctgtttcccactgtgccagccagtccggacgatagaccagatactggtcaaacaggtccgccgctttactggaaagctggaacagttttcgcttgtcgctatcgtcagtcagataatgccgcaacagggtaaagtcttcgcgctccagcaattgcggcagcagagtcatcagtttccagctcatgctctgtttgttaaaggcgctctctttggggatttccggtaacacccggacgaacatatcccagataaagctcgctggcagcggaaaatcaatgtttgccgcaataccaaacttttggctcagggtcatttgcagccactgtgccataccggtactttgcaccagaatcatctctggttcgaaaggatcgtccagccgttcgcgttcgacaataaactccatcaacgcttccagcacgtccagacgattggaatggtagacccttaacatagcggctcctgattactgacgattcgggcaatgcaggcgggtcatctcgccttctctgcccccgggactaactagcgtaacgctgatgctgacacatcccgcctggcttgtctgcattcggttgacctgccagttggcaggtgggctaatcgcgcgcagttgcgtttgctgccagccatgccgccagagctgttggtactggtttctgctggcaagactgttcattaatgttcgctggaaaccgcttaacgcagtgacaatcatcaccatcaacaccatcgccaacattacctccggcaggctaaagccttgttgattcttcagggaagcactcataacgccctctctttcagcggttaaatcagggaagctgacataacgccctctctttcagcggacaaaaatcgctccagccgcgtgggctaaaaacaatgtttccatcaatgacttcgcctgttcgccacaagctaacgccttcataaccggcaatcaataaggcttcattatctgccagtaaacgcaaacaaacctgggcatcggtttcagcgtactggctgcactgaactgctggctgcgtctgccagcagtgcatttttccccacgccagcgcgctctgaacgatggcctggcggcgcaaactctgactttccatgctcacgcgagaggcaaaactgcgatcctgttggctcattccttgtaatagcaaactacccaaaaccagcagcatcaggaccagagccagactgctaacacccttttcgcggttcacaggttgaatcctgtcacgctatagctggcattcaccacggtttgcggttcagacttactggcagcacgcatattaaccgtcaacaccgggctgaagccgctgacatcctgacgtacgacctgaaaagtgtcgataatgatggcatccggattagtgactttatcccagcccttaccttcacaggatgtcgcaccgcgtagcgtttccagcacatgctccttcagacgaaatccaatctggtcggactcttttaccggttcgcgatcccagataccgttactgttcgcatcccactgcacaatgacacagtcaccctgtccgacaatttccagcccttcgccggtacagatgccatgacaataacccgccctctggagatgcttcgcgacggtaaatacccgcagccagatttcatcttccagcgccagcttacgggtgctcgttaaactttcacgctgtaacgcaggcagaaagcgtgccgcccccagcaacaatacgctactgatcgccatagcaatcaacacttccagcagagaaaaaccttgctcttttacaggcatccttctgtttctccttgctgacaaagccggagtcttccccacgggctaaccaccagccaccactcgcccgtactgtttttgaagcgaatatgcccggcccatgcggtattgcgcaggccaaagaaagcaaggctaggtgtcaggtcgctcatttcgacttcgggccagcgtggcacaaagaccaatggactactgccatgacaggtattggccccagcagcggaactcacaaggcaccataacgtcccctccctgataacgctgatactgtggtcgcggttatgccagttggcatcttcacgtaaatagagcaaatagtcccgcgcctggctggcggtttgccatagccgttggctctgctgccagtattgccagccatagagtccacttgcgcttagcatgaccaaaatcagcatcgcgaccagcgtttcaatcagcgtataaccacgttgtgttttcatgccggcagtatggagcgaggagaaaaaaagacgagggccagtttctatttcttcggcgcatcttccggactatttacgccgttgcaggacgttgcaaaatttcgggaaggcgtctcgaagaatttaacggagggtaaaaaaaccgacgcacactggcgtcggctctggcaggatgtttcgtaattagatagccaccggcgctttaatgcccggatgcggatcgtagccttcaatctcaaagtcttcgaaacggtagtcgaagatggattcgggtttacgtttgataatcaacttcggcagcggacgcggttcgcggcttaattgcagatgagtttgatccatatggttgctgtacagatgcgtgtcgccaccggtccagacaaaatcacccacttccagatcgcactgctgcgccatcatatgcaccaataacgcgtagctggcaatgttgaacggcaggccgaggaagacgtcacaggagcgctgataaagctggcaagagagtttgccgtctgccacatagaactggaagaatgcatggcacggtgccagcgccattttatccagttcgcctacgttccacgcactaacaataatgcggcggctatccgggtcgtttttcagctggttcagtaccgtagtgatctggtcaatatgacgaccatctggcgttggccaggcgcgccactgtttaccatacactggcccgaggtcgccgttttcatcggcccattcgtcccagatggtgacattgttttcgtgtagataagcaatgttagtgtcgccctgcagaaaccacagcagttcatggatgatggaacgcaggtggcaacgtttagttgtcaccagcgggaatccatcttgcaggttaaaacgcatctgatgaccaaaaatggaaagcgttccggttccggtacggtcgtttttctgtgtgccttcgtcgagcactttttgcatcagttctaaatactgtttcatggttcctcaggaaacgtgttgctgtgggctgcgacgatatgcccagaccatcatgatcacacccgcgacaatcatcgggatggaaagaatttgccccatgctgatgtactgcacccaggcaccggtaaactgcgcgtcgggctggcggaaaaactcaacaatgatgcgaaacgcgccgtaaccaatcaggaacaaaccactgacagctcccattgggcgtggtttacgaatatacaggttgaggataataaacagcaccacaccttccagcagcagctcgtaaagctgacttgggtggcgcggcagcacaccgtaagtgtcgaaaatggattgccactgcgggttggtttgcagcagcaaaatatcttctgtacgggagccagggaacagcatggcaaacgggaagttcgggtcaacgcggccccacaattcaccgttaataaagttgcccagacgcccggcaccaagaccaaacggaatgagtggtgcgataaaatcagagacctggaagaaggaacgtttagtacggcgggcgaagataatcatcaccacgataacgccaatcaggccgccgtggaaagacatgccgccgtcccagacacggaacagatacagcggatcggccataaactgcgggaaattgtagaacagaacataaccaatacgtcccccgaggaagacgccgaggaagcccgcatagagtaagttttcaacttcatttttggtccagccgctgcccggacgattcgcccgtcgtgttgccagccacattgcaaaaatgaaacccaccagatacatcaggccgtaccagtgaagcgccacgggtcctatactgaaaatgaccggatcaaactccggaaaatgcagatagctactggtcatctgtcaccacaagttcttgttatttcgctgaaagagaacagcgattgaaatgcgcgccgcaggtttcaggcgctccaaaggtgcgaataatagcacaaggggacctggctggttgccggataccgttaaaagatatgtatatgatccgcgttataaccctccgcgaatcagcccgcccatgccgcgacgctccataaaggctgcaacctgatggcgaacttcggtcgccagttgcgcttccagactacgctgcgcaagattttctgcttcggcataatcaatgcgccgcagcaggtattttgcccgcgctacagaacgtccgttcatagacagatggcgatacccaagcccaatgaggattgccacgcacatgggatcgcccgccatttcaccgcacaaacggagatcgattccatgtatttccgcttcccgggcgatcatcgccagagctcgtaacattgcaggatgaagactgtcataaatgttcgccacccgggtattgttgcgatcaacggccagaatgtattgagtcagatcgttggtgccaacagagatgaaatcgacccgctttgccagatgcggcagcataaataccatactcggcacttccagcatgatgccgatacgtggtttgggaatttcgtaaccgatcatctcctcgacttcacgtccggcacgttcaatcaggcggcgtgcttcatcaacttcatcgaggcttgtgaccatcggcaacagaatattcaggttgcccgtagcggcattagcacgcagcatcgcccgcacctggatcaagaagatctccggctgatcgagcgtaatgcgaatcccacgccaacccaggcatggattctcttcgctgatcggcatgtaaggcagctgcttatctgctccgacatccagcgtacgcaaggtgacgggtttatcattgaacatttgcagcatcccctgatactgcgccacctgttcttcttcgctcgggaaaccactttgcagcatgaatgggatttcagtgcgataaagaccgatgccatcaatacggctgcccagtttttcttcatgttccgggcttaaaccagcattgagcatgacttttatacgctcaccgctttttaactgcgcgggtaaattgacgtcatcttccgccagacggctaagctcaatctcttcactaattagccgctgatattcttgcagcagtaccggctccggatcgaccagcaattcaccgcgatagccatcaacgatcagcgtcctacgatgcagcacgctaggctgaatatccgcgcccatcacggtagggatccccagcgcacgtaccatgatcgcagcatgggagttggctgcgccatctcgcacgacaacaccgactaagcgatcctggggcagctcagcaagcgttgtcgcactcagttcatctgccaccagaatgaaacgttccggccaggcgttcggcccttgattagcgtcatcaagatgaaacagcaatcgctgacccagcgcacgtaaatcgccagcccgctctttgagatagttatcacttagcgcggcaaactgttcggcaaatttttcaatgaccgtttttaccgcccactctgccacgctgcctttatcaacctcggcaaacaattcgcgacgcagccgggtgtcgctaagcaggtggctgtaaagatcgaaaatagccgccgtttctttttgtgcaccggcggcaaagcgtttgctgtagcggcgaaactcgtttgccgcttcttccagcgccccggtcagtcgttcgcgttccagagccggatccagcgtacttgcctgatacacctgttccattaaaggtaacgtggcatcctgccagccttcggcaatcgccacaccaggtgctgccggtaatgcgcggattcgcgtctggcgatattgcccaaacaaggcagtcaactggctctgagaaagaatagctgccatctgggtggcaagcgtcaccaggaaggattcttcactttcgtcatactggcgcaactctcgttgctgtaccaccagtacaccaagcaactggcgacgttgaataattggtacgcctaaaaacgcgcggaaacgttcttcttttacggaggggatgtatttgaagctggggtgcttttgcgcatctgcaaggtttatcggttccgccagcctgccaaccaggccgacgatcccttcatcaaacgcgagcgttacagtgcgaccgcgtggttttttcagcccccgggtcgccatcaggtagtaacaacgtcgatcatgatcggccaggtagacgctacagacctcggtatccatcgcaagacagatgtcggtaaccagaatatttaacgcctcattcaggcgtggtgcgctggctaccttttcgactatttcgcgcaggcgagtgagcataattggcgtgacttaacctcttttacgtcgataagcagatgcgttttgtggttttggcgtattttcctgcagactcatcaccacactcgcgaactctttcattaccctacggtagacatcacgtttaaaactcaccacctgtctgaccggataccagtaacttacccatcgccagccgtcaaactctggtgtactgctggtttgcatattgatttctgcatcgccgctcaccagctgcaagagaaaccatttttgtttttggccgatacaaaccggcttcgtgtcccaacgcaccaaacgtttcggtaatttgtagcgcaaccagttacgcgtactagcaaggattcgaacgtctttgcggcttaatcctacttcttcaaacaattcacggtacatcgcctgctctgcggattctccggggttgattccgccttgcggaaattgccaggagtgctgaccaaatcgccgggcccacattacctgcccctggcgattacaaatcacgatacctacgtttgggcggtagccatcgtcatcaatcaccggactacctcaaaataaagctttatatacgaatgattgtttcatactccaggaagacggtaaaccactctctgcagggcattacacactaataacaattgaataactcacagttatgtgcagagttataaacagaggaaggggtggatagccgtttttattcaccttttctgtggatagagttgtgaagaactacggaattactacgggaaaacccggagcattctgaataagcccgatatagacattttaaaatattcattatcagtcaatgcattacatgtaattttagtaatgaaaaagagtaattcgtgacccaggtcacacctctcatttacgggttggcgaaagatcaaccaatgccgtatttatccacagaatgtgccactaagttaagcactgaaccactaaaaactggagtttcgtcgcacgtcaaggctgtaaatggaaacagtagtggaggtttttcacagttatcccagctttctgtggataacatggtgtaagatcctgtttattttcagtgaccagatttggaaaacccgttgcagtgttgcgcaactcgattaccggcaacctaaaaagcaatataaatcagagaattgaacaacgcatgtggaaaaagttacactgcgaatattcggcacataattgctgtttgttttttaatcaaggtatcatgacatgtcccaacctcgcccactgctctctcctcccgaaactgaagaacagttgttagcgcaagcacagcaactttctggttatacattgggagaactggcggcacttgtcgggctggttacgccagagaatttaaaacgcgataaaggctggattggcgtgttactggagatctggctaggtgccagcgcagggagtaaacctgagcaagattttgctgctctgggcgtggaacttaaaactatccctgtggatagtcttggtcgtccgctggaaacaacattcgtttgtgttgccccgttaacgggcaatagcggggtgacctgggaaaccagccacgtgcgccacaaactcaaacgcgtactgtggataccggttgaaggcgagcgcagcatcccgctggcgcagcgtcgcgttggaagtccgttgctgtggagcccgaatgaagaggaagaccggcagctacgcgaagactgggaagaattaatggatatgattgttctcggtcaggttgagcggattaccgctcgtcacggggagtatttacagatacgaccgaaagcagcgaatgcgaaagcgcttaccgaagccattggtgcccggggcgaacggattctgacgctgccacgcggcttttatttgaagaagaatttcaccagtgcactactggcccgtcattttctgatccagtaaccatcgctttgacctgccgctttccgggcatataattaccgcttcatttttttggcagggctttttagatgttatttgcatggataaccgatcctaacgcctggcttgcgctcggtacgctgacgctgctggagatcgttcttgggatcgacaatattattttcctttctctggtggtggcaaagcttcccacagcacaacgtgctcatgcgcgccgtctggggttggcgggagccatggttatgcgtctggcgctgctggcaagtatcgcctgggttacgcgcctgacaaatccgctttttacaatattcagtcaggaaatttctgcccgtgatttgattctgcttctgggtggcttgttccttatctggaaagccagcaaggaaatccacgaatccattgaaggtgaagaagaagggctgaaaacacgcgttagtagtttcctcggcgctatcgtgcagattatgctgctggatattatctttagcctcgacagcgtgattacggctgtgggtctgagtgatcacctgtttattatgatggcagccgtggtgattgccgtaggcgtgatgatgttcgccgcgcgcagcattggtgattttgtcgaacgccatcctagcgtaaaaatgctggcgctctctttcctgattctggtgggctttaccctgattctggaaagtttcgacatccacgtaccgaaaggttacatctacttcgcgatgttcttctctattgcggttgaaagcctcaacttgattcgcaacaaaaagaatccgctctgatactccgtacgctctcctgcgggagggcgtactcactccttttaccctcacagtttaagattttcctgctttcaagatatataacgtcggtttataaacagactattatcataggtaggccaaatgaggataaccggatgaaaaaatgggcagtaataatttctgcagtcggactggcgtttgctgtttccgggtgttccagtgattacgtcatggcgaccaaagatggccgtatgattttgaccgatggaaaacctgaaattgatgatgataccgggctggtgagttatcacgatcagcaaggtaacgcgatgcaaattaaccgtgatgatgttagccaaattattgaacgttaacaaataaggtcagcatccggctggccttaagatttttctctttcccttttcccttccctctgccatttttatattccttatgtcgtgattataaaaaggaaacggctatgcaatatcaccgtataccccacagtagcctggaagtcagcacgctggggcttggcacgatgacgtttggtgaacagaacagcgaagccgacgcccacgcacaactcgactatgccgtcgctcagggcattaaccttatcgacgttgccgaaatgtacccagtacctccgcgccccgaaacgcaagggttaaccgaaacctacgtcggcaactggctggcgaaacatggcagccgcgaaaagttaattatcgcctccaaagtgagcggaccgagccgcaataatgacaagggcatccgcccggatcaggcgctggatcggaagaatatccgcgaagcgctgcatgacagcctcaagcgcctacagactgattacctcgatctttatcaggtgcactggccgcagcgcccgaccaactgcttcggcaaactcggttatagctggacggattctgcgcctgcggttagcctgctggatacgctggacgcactggcagagtaccaacgcgcgggaaaaattcgttatatcggcgtgagcaacgaaactgcatttggcgtaatgcgctacctgcatctggcggacaaacacgatctgccgcgtattgtcaccattcagaacccttacagtctgttaaaccgcagttttgaagtaggtctggcagaagtcagccagtatgaaggggtcgaactgctggcctatagctgcctgggtttcggcacgctgaccgggaaatatctcaatggtgcaaaacccgctggcgcacgtaatacgctctttagtcggttcacccgctatagcggtgagcaaacgcaaaaagccgtcgcggcgtatgttgatatcgccagacgtcatggcctggaccctgctcagatggcgctcgcgtttgtacgccgtcaaccgtttgttgccagcactctgctgggcgcaaccacgatggatcagctgaaaactaacatcgaaagtttgcatctggagttaagcgaagacgtattagctgaaattgaagcggtgcatcaggtttatacttatccggcaccataagattaacgccggttaaaaccggcgttaaatattaatgacggcgctgccagatccacagcgccgttattgccagcgcaaacagcgcaccgaagccaatgccaatgggcacgaccgggatgcctatcattaccgccaggctgtaaatgcccagcatcaacaacatggcgctgttttcgccaaggttttgtactgcaatcgcattccccgccccgacgctttttttaccccgctcctgtagcaacgcattgagcggaacgacaaaaaagccccccatcacgccaatcagcatcaacaaggcataggctggcagcagctcgtgttgcagggaaaaaatcagtaccaccacgccaatcaaaatcccggctggcatacagcgactcacggtttccagcgtaactaacttcgctgccgcacctgcgccaaccacgataccaatcgctaccatcgcgttgagataggtgggcgtagcgttatcggtaatgcccagcgccaccggtacccacagcaccaacaggaaacgcagcgtgacacccgctccccagaataaactggtgcccaccaggctaaaacgcgtttcaccattgcgccataggctggtgcaggcattcaggaaactgcgggtcatgttgatgagattccaggactgccccggacgcgccgccgccagtttgggaatgtagatattggcaacgaccgcaccaccgtaggccagtgcgcatgcggccagggcgacgaggacatgccagtcagccagcacaccaccggctacggaaccgagcaaaatcgccgctatggtagaagcttccattaaaccgttagctttcactaacttactacccgtggttaattcgccgagaataccgtatttcgccggactataggctgcagcaccaacacccaccagcgtatagccgagaaacggattgataccaaagcagatactggctgcgcccagcagcttcaggccgttggcaaacatcatcacccggcctttggcgaagctatccgccacctgcccgacaaacggcgcaaaaagaatgtaagcacctacaaacaccatttgcaggatgggctggctccactccggatagaactgcgctttcagtaacgccagagtggcaaacagtagggcattatcgccaaacgcagagagaaactgcgccacgataaccgctttcatccccttgctccacaagctagtgttagtgtgcacactctcactcatcgtgttgttccgcttcgtctacccagcttttcaacgtgacaaagtcaggtttgccgctgccaagtaatggcatctgtttcagatagcgaatatcgcgcggtacagcaagctccggcacgccgtgctcgcgggcatactgttgcaacttatcgcgcgtcagttcgttatctgtggtgaaaagcaccagtgcctcgcctttgctggcatcgctcttaatcgcagtggcatggactttatctgggctaacaccaagtgccagttgttccaccatttccaggctcaccatttcgcctgcaattttggcaaagcgttttgcgcggccctgaatctgcacaaagccctgctcgtcaaaacgcacaatatcgccagtgtcataccagccgcgctccatttcgccgcgaacattctcggcggtgggcacttccagtacacctggcttctccacccgcagatagccgttcattatgttcggccctttcagttgcaggcgtccgccctcttcgataccagggacgctcaacaggcgcgcatccattcctggtagaatacgccctaccgtaccgggtttcgccgccatcggtacgttgatagaaacgacaggcgcgcattcggtcacgccgtagccttcaaggatgcgcaggccaaatttatcctgccaaagctgtttggtactttcttgtaatttttctgcgcctgccaccacatagcgtagacgatagaagtcatacgggttggcgaaacgcgcgtagtgaccgaggaaagtgctggtgccgaacaacacggtgcaactgcggtcatacaccaactccggcacaatgcggtaatgcagcgggcttggataaaggaacacttctgcacctgtaagcagtggcgtaaacaggcctaccgtcagcccaaaggagtgaaacagcggtaacgcgctcataaagcgatcgttggtggtgaagtcggcaatcgttttaatctgctcgacattcgccagaatgcttttatggctatggacgacgcctttcggatggccttcagaaccggaggtaaaaaggatcagcgcctcttcttccggctgctgtttaacctgtgccagacgcggcatcagcaaatgagcgaagatccatactttgtcggcagtggtgacatctgcttttaaatcttccagatagacccagcgcacctgagtaagttgctccggcagatgccagagtttgcctttatcgagaaactggcgggaagtgaagatggttttgatttcagccgccgtaatagcactggtcagcccttttaccccggcagtgtagttcatcattgcgggcatgcggcgacgggcgatggccccaaaaatcactgccgcactgatgcctgcattgggcagcattaagccgatgcgttcgccttcaacactgtatttttcaaggatgcgtccaacaaacagcgttttcgtaagcaatttgcgataggagtctggggtaaagttgacgtcttcgacacatttcttcccggctccgaagcggtacattgcactcagtaaagattcgtacagcgtttcacgcgggcgcaccgccattcgcgcttccatcattatttgatgcagcatttcgccagcgattttgcgacggtcacgggcacgcggcgcatccggcatcgccacctgcgttggtggcaaaatatgcagagtaatttgcgggaacaagcgacgtttaaccagacctttcaggcggctgaagtgcgtaagttccgccccttcaatacgcacaggaataaccgttgcaccagacttcgccgcgacaaaacccgcgccatcgtagattttcatcaggctgcctgtcgtggtgatgcgtccttcagggaaaatcaccactggtcggccctgttccaccagacgtaccagatgtttaatagccataggttgcgtcgggtcgagaggaacaaagtcgataaaacttttcagccaacgcatataccactgttggcttatactggtgtaaacggcaaacactggacgcacaggtaaaaacagtccaagcaaaatgccatcaataaaagagacgtgattaggcgtaattagaacgcgctcgcccttcagtgcctgggtgtcacccgtaacgcgaacgcgatacaaaacacggcacaaatttcgaaaaaagctaaaaagcattccaactccctttgctctgattcagtaaaagcgaatggagggagattacacgagataaagaacgcgagcgacagtaaattaggtgcgaaaaaaaacctgcgcatccgcgcaggttggtgcaagagacagggtacgaagagcgtaccgaataatctcaccaatcaatacctctgggatcttgattgtggtctgcacgacgactcttcgccagcgagaaaacgcaaaggaatgaagggaaatgcaacgaggtgtgtaaattgtcggttactgttacagattgatgaccggcaaaaaaaacctgcgcatctgcgcaggctggtgtaattcatgtgctcaacccgaagttgacttcacctatcaatacctctgggatcaccactttagcaacctgaagccaaacgccaccagcggtcaatcgcaacagcgtttcgcaaagtgtaaccaaaggtttgcaatctctttttttgtcttacttatttgcgtttggctcacattcccacgatgaaaacacgccaccccttgaaccaacgggcgttttccgtaacactgaaagaatgtaagcgtttacccactaaggtattttcatggcgaccataaaggatgtagcccgactggcaggcgttagtgtcgccaccgtttcccgcgtcattaataatagtcccaaagccagcgaagcttcccggctggctgtgcatagtgcaatggagtctcttagctatcacccgaacgccaacgcccgtgcgctggcgcagcagaccactgaaacggtcggtctggtcgttggtgatgtttccgatccgtttttcggtgcaatggtgaaagcggtcgaacaggtggcttatcacaccggtaattttttattgattggcaacggttaccacaacgaacaaaaagagcgtcaggccattgagcaactgatccgccatcgctgtgctgcgttggtcgtccatgccaaaatgatcccggatgctgatttagccagtttaatgaaacaaatgcccggtatggtgctgatcaaccgtatcctgcctggctttgaaaaccgttgtattgctctggacgatcgttacggtgcctggctggcaacgcgtcatttaattcagcaaggtcatacccgcattggttatctgtgctctaaccactctatttctgacgccgaagatcgtctgcaagggtattacgatgcccttgctgaaagtggtattgcggccaatgaccggctggtgacatttggcgaaccagacgaaagcggcggcgaacaggcaatgaccgagcttttgggacgaggaagaaatttcactgcggtagcctgttataacgatagtatggcggcgggtgcgatgggcgttctcaatgataatggtattgatgtaccgggtgagattagcttaattggctttgatgatgtgctggtgagtcgctatgtgcgtccgcgcctgaccaccgtgcgttacccaatcgtgacgatggcgacccaggctgccgaactggctttggcgctggcggataatcgccctctcccggaaatcactaatgtctttagtccgacgctggtacgtcgtcatagtgtgagtactccgagcctggaggcaagtcatcatgcaaccagcgactaaccgcagttaaagcaattccagcgccagtaattcttcgatggtctggcgacggcgaatcaaccgcgcctgaccattatcaaacagaacttctggtaacagcggacggctattgtagttggaactcatacttgcgccatatgcccctgtatcatgcagtaccagataatcacctgccttcacttccggcaaggcgcgggtttcaacatttcccccttcctgctgggtaaagacatcgccgctttcacataacggtccggcgacgacggtttccaccgttggcgcgtgttccagagaacgaccatcagctgccagggcactgatatggtggtaactaccgtacattgccgggcgcatcagatcgttgaacccggcatcaaccagcacaaagtggcggctccccatttgtttgacgctccgcacctgagtaattaatacgccagactgcgctaccaggaagcgacccggttcaatttccagtttcacagggtggcccaaatggcgggcgatttgctcacgcgcggcattccacagaccataataatgttcggtatcaaccgcctcttcaccctgttgataaggaacagaaagcccaccgcccgcagaaatagcctgtaaatcctgaccgaattcgatgacctgacgcaccatagcaccacacacctgttccagatgggcataatcaacgccagaaccaatgtgcatgtgaatgccgaccagctgcagatgatgacgttgtatcacgtccagtgcggcgggcagatcggtgtaccagataccgtgcttgctgttttcgccaccggtattggttttttggctatgtccgtgaccaaaccccggattaacgcgcagccatacccgatgccctgggctaacctggcccagttggtcgagcatatcaacagaacccgcattcaccggaatttgcaattcactgacgcgttcaagcgtcgcctgatcgataacatctgccgtaaaaacaatatcatcggggtgcgtttgcggattgtaacccgccgccaacgcacgctctatttcgcctaagctgacggaatccactttcacgccctgctcacgcattaagcgcaaaatatgaatattggaacaggctttctgtgcaaagcgcaccacatcaaactgtttcagcgctgcaatctgccgacgaataatttgcgcatcgtagacccacaccgggcagccaaattcagcgggcaaacgcagcagattttcggcggtgagatcggtatcggtgctgaacagactatgtggcataacaaactccagataagtgcttttttatgattacgccacatcataaaaagaataaaaaatatcgatttatgtcgagtctatgcaaaaatgatatggattaccggattgcgagagagcgctaatggccgccgttaacttacgtcatattgaaatttttcatgcggtaatgaccgccggaagcctgactgaggcggcacacctgctacacaccagtcagccaaccgtcagccgcgaacttgcgcgctttgagaaggtgatcgggctgaaattgtttgagcgcgtacgtgggcgattacatcctaccgtgcaaggactgcgtctgtttgaagaagtgcaacgatcctggtacggactggatcgcattgtcagcgccgcagaaagtctgcgcgagtttcgccagggagaactgtctattgcctgcctgccggtctttagccaatcttttttaccgcagctcctgcaaccctttctggcacgttatcccgatgtcagcttaaatatcgtgccccaggaaagtccgctacttgaagagtggctcagcgcccagcgtcatgatttaggactcactgaaacgctccatacgcctgcgggaacagaacgtaccgaattactctctttagatgaagtgtgtgtgttacctccgggtcatccgctggcggtaaaaaaggtattaacgccggatgattttcagggtgagaactacatcagcctttcccgtactgacagctatcgccagttgctggatcagctatttactgaacatcaggttaaacgacgcatgatcgtagaaacccacagcgccgcgagtgtctgcgcaatggtacgggcgggggtaggtattagcgtggttaacccgctcaccgcactagattatgcggcaagcggtttagtggtgcggcggttcagtattgcggttccgttcaccgtcagcctgatccgccccctgcaccgcccgagtagtgcgctggttcaggcgtttagtgggcatttacaagcggggttaccgaaactggtcacttctcttgacgctattttgagcagtgctacgacagcataattagctcagcataaaagcgacagcatcctcggcatggatcgccgcggtatcaaacacaggcaaaacactgcgctcttctggcaccagtaaaccaatttctgtgcagccaaaaatgacgccctgtgcgccctgttctgcaaggcgagcaatcacttgcgcacaataagcgcgactcgcttcggtaaattgccccagacacagttcttcaaaaataatctgattaattttcgcccgttcatccgcttcaggaataagacaattgatggaaaattgttccgtcagccgcccgcgataaaaatcctgttccatggtgtaacgcgtacccagcagcgccacacgagtcattccggccccggtaattgcacgtccggtggcatccgcaatgtgtaagaaaggcagagtgcaacgactctcaatggcatccgccactttatgcatcgtattggtacatagcacaataccttctgcgcccgcccgctgtaagccaagcgccgcctcagccagaatgtccccggttttatcccattccccgcgacgctggcactcttctatttcatgaaaatcgacgctatgtagcagcacttgcgcagagtgaagcccaccaagccgctgtttaatgccttcatttatcaaacgatagtaaggaatggtggattcccagctcattcctcccagcaaaccaattgttttcattcctctctcctgatgtgtgttaccgcaacaaggctgaataaggaacgagacaaacgcctcaacggccaagtgcccaatctctattaacgaaaaaagggccggatgtacagcacatccggcccgtgaaatcagacgccgatatttctcaacttctcgcctgccatcagtttgcgttcgatatgttccagcgtgacatttttggtttccggaatgagccagaaagtaatgcccacaaacgcaatgttcagcgcagtgtagagccagaacgtaccggcagcgccaatgctatcaagcagtgtcaggaaggtcgcgccgataatcatattgctcacccagttcgtggtggtgctacaggtaataccgaaatcgcggcatttcagcggctgaatttcagagcacaggatccacaccactggcgcggcgctcatcgcataaccggcaatacacatcatcgtcatgccaacagagagccaggacaagccactggaagccgtaccgttatcaaactgcatcaggcaatagcccagcaccagagtgcctaacgccatcacgctgaaaccaattttcagagccggtttacgccctgctttatctaccgtaaacaccgcaataaaggtggcgaacataaaggtcagccctacgaccagagtcgcaatcatctgttgttctgtggtcgtaaagcccgccattttgaagatacgcggcgcgtagtacatgatgatgttcataccggtaaactgctgcatcgcctgcaacaacataccgagaaacacagcacgacggacgttacggttgatcttaaacagtgcccaaccgccctgttttaacttcaggctttcacgaatttcgttgagttcttctcgcgctttttcgctcgtatcgcgcagcatacgcaatacttcttccgcctcaatatgacgccccttttccgccagccagcgcgggctatttggcaggaagactaccagaataatcagcagaactgctggtaaagcaagaacccccaacattgcgcgccagttaccgctataactgaacgctgtatcggataaaaacgccagcacgatgccgagtgtgaccatcaactggtacatactgatcatcttaccgcgaacgttttcacttgccatttcagaaagatacagaggagcggtgtaagacgcgatcccgacagcaatgcccagcaccacacgagcggcgattaacatctctacgctggtcgcaaaagcggaccctatagaaccgagtacaaacaggatggcccccgccatcaggctgtatttacgccccaggcggaagctcagccaaccattaaacagcgcaccaattgctgcaccgagcatcatgctactaaccacccattcctgcaaacgactggtcagcacaaagtgatcggtaatgaacggcaacgctccggcgattacgccgatatcaagaccaaataacaatcctgcgaccgcagcagctacgctaacaaacatattcatacgccgcgtatcccgcaaagaacgtggcgttaaagcagattccgtattgatagtaaccattttttcctgccagcagagagtaagacatagtgaaaaaatacgtgaacaactcacgcaggtgtcaggtcggaaacagcataaatatggattaaattgctgcgacatgtcgttatgtgatggatattccaattttcaaattaagttgaattattgagattattattaaccacctaattttacagcagataaaattcataaagttcattaattgataattaatatggattatttcataaccatgatatggattatgatgatctacaggtataaaaaaccctgccatgcggcagggtcataaaagtaagaagaatgaattaacgcgccagccaaccgccatccacggcaatggtataaccattcacataatcactagcgctggaggcaaggaacactatcggccccatcaggtcactcggcagtccccaacgaccagctggaatgcggtcgagaatttccgcgctacgttgttcatctgcccgtagttgttgagtattgttggtcgccatgtaacccggggctatcgcattaacattaatgttgtgtttagcccattcgttcgccatcaatcgcgtcacacccatcacgccgcttttacttgcggtataagaaggcacacggatcccgccctggaaggagagcatactcgcgatattgataatcttgccgccattgccttgcgcgataaagtgtttcgccgctgcctgagacatgaagaatacgctcttgatattcaggttcatgacatcgtcccagtccttttcgctgaactcgagagcatcttcgcggcgaatcaatccggcgttattcaccaggatatcaatatgaccaaactccgctaccgcgcgatccagcagtgctggaataccatcaatctttcgcagatcggcggtcaggcttaaaaaacgacgccccagcgctgtgacctgctcgatggtttcagtcggttcaacgatgttaatgccaacaatgtcacagcccgcttgcgccagccccaacgccatcccctgacccagtccagtatcacaaccagtgacgaccgcaactttaccttcgagagaaaatgcacttaaaatcataacaataccttattcgtttatgcccacaattagcgcaaatctttaacggccacatggtccatatcatcaaagacctggttttcaccgaccatgccccagataaaggtataagctttggttccgacaccggaatggatgctccagctcggggagatcaccgcctgctcgttatgcatcacaatatgacgcgtttcttgcggctgccccatcatgtggaaaacgcaggcgtcatcatccatattgaaatagaaataaacttccatccggcgctcgtgggtgtgacacggcatggtgttccacaagttacccggagccagctccgtcagccccatactcaattggcaggtttccagtacatccgggacaaaatatttgttaatcgtgcgacggttactggtgaggttatcgcctaacgtgactggagatacttcgtccggtgtgacttttttggtgggatacgtcgtatgcgcgggtgcgcaattgtaataaaacttcgccggagtgccggtatcaatactggcaaagacaacttcttttgcacctttaccaacatacagggcgtcgcggtgaccgatttcatagcattggccatcgacagtaatcgtaccggcaccgccaatattgataacacctaactcgcgacgttcaaggaaatagcttacgccgagttgtttaccaacttccccgccaacggaaaccgttttagttatcggcataatgccgccaacaataattcggtcaatgtggctgtaaaccatggtgtactcatcggcgacaaataccttttcaaccaaaaattcattgcgcagcccttgggtatccagcgtttttgcgtgcgcactgtggatgctctgtcttacgtccacatcaacctccgataatcagtgaagcgtgaaaatagaaaacgatagtgaaacactgtttcgttttctctataaagggatgatatgcccatgggctagggttttcaattaaaaataaaacaatgtttcatttttaagttaaggattaaaaaaagtgcagtgtcgatcacgaatatgtcatgagaatggaaaaatgagggagcccagaaaatgtatgtcgacttgccagccatcattattcaacagattaatgacggcagatatttatcggtaaggaggaaatgcagagttattcgtcacgttcaatggtcaatgccacaccctggcccccgccgatacaaagcgttgccagtcctttgcgggcattacgtttcaccatttcatgaaccagagaaaccaggattcggcaaccggaagcgcctatcgggtgaccgagtgcgatcgcgccaccattgacattgacccgacgctcatcccactcaagcatcttgccaacgctaagcgcctgtgcagcaaacgcttcattagcctcgataagatcgacttcagccaactgccagcctacacgctccaggcaacggcgggtcgcatacaccggcgcaattcccatcaatgccggatctacaccaacgctggcaaatgcgcgaatgcgggccagcacgggtaaattcaacgctcgtgctttggcttcgctcatcatcattaccgcagctgcgccatcgtttatggaacttgcattacccgctgtcacagaaccgagactatcaaaactaggatttaaacgggctaagccttctgcgctggcgtcagtgcgtggctgttcatcggtatcaacaaccaacgtctgcccgttactttgggtcattaccgggacgatctcatctttaaatcgtccggcgtcaatcgccgctcgcgctttttgttggctgctaagtgcgtaagcatcctgcaactgacggctgatgccatattcgcgagccagattttcggcggtgacaccaatatgataatcattgaaggcatcccacaacccatcatgcacaagactgtcaaccaactggctattgccaagctgtgcaccggtgcggctatcagtcagaacatgtggtgcgcggctcatgttttcctggccaccggcgatgacaatatcagcctcgccacactgtatcgcctgagtagccagatgcagtgctttaagcccggaaccgcaaacgtcattaatagtgattgcagaaacgctattaggcagaccacctttaatagcgctttgccttgccggattctgccctgcccctgcagtcaacacctgaccaagaattacttcatccaccgcatatgcaggaacgccggtacgttctattaacgctttcacgaccagactaccaagttccacggcggaatgacccgctaacgcaccacgaaagcagccgataggtgtccgtaacgccccgacaatcacaacgtctttcatcacaacctcgcaccaattaacagtgcaatagtaaatgattgttaattacagttatcttaattgtttaaaaaaagtgatttttatcacaaaggaaatatgcctgagcagcagtcagagacataactggcacgtaaggtttgcaaccactaacccaccaatagaggggtagatagggcgttaatctcccatacttaacctggtttatggtaaattgccctccattttgtttaatttgtagatgatacgttcagataatgtctaatatttggtctaaagaagaaactctgtggagtttcgcgctctacggcacagccgttggtgcaggcacgctcttccttcctattcagttaggtagcgcaggggctgtggtcctgtttattactgctctggtcgcctggcctttaacatattggccacataaagccttgtgccagttcatcctcagtagtaaaacaagtgcaggtgaagggataacgggcgcggtaacacactactatggcaagaagattggtaatctgattaccacgctgtacttcatcgccttttttgtcgtcgtgttgatatatgcagtggcaattaccaacagtcttacggaacagctggcaaagcatatggttattgatcttcgcatccgtatgttggtgagtctgggtgttgtattaattctgaatctcatttttctgatgggacgtcatgccactattcgggtaatgggatttttggtattcccattgattgcctatttcttatttctttccatttaccttgtcggtagttggcaacctgatctattaacaacccaggtagagttcaatcagaatacccttcaccagatatggataagcattcccgtgatggttttcgcctttagccatacgcccattatttctacgtttgccatagacagacgtgaaaaatatggcgaacacgctatggataaatgcaaaaaaattatgaaagtcgcttatctcatcatctgcataagtgtactgttctttgtctttagctgcctgctttctattccacctagctatattgaagctgctaaagaagaaggggtcaccattttaagcgcgctttctatgctgccgaacgccccagcatggttgagtatttccgggattattgtcgcagtagttgcgatgagcaaaagtttcctgggtacgtactttggcgttattgaaggtgccacagaggtcgtcaaaacaacactacagcaggttggtgtaaagaaaagtcgtgcatttaaccgcgcactaagtattatgttggtaagcctgattaccttcattgtttgttgcattaacccgaacgcgattagcatgatttacgcgatcagcggcccgctcattgccatgatacttttcatcatgcctacgctgagtacgtatctcatcccggcgcttaaaccctggcgttccatcggaaatctgattacgctgatcgtgggtatcctgtgcgtaagcgtaatgttctttagctaatatcagttgtggatggttcaaaattgctacaattttgaaccattccatttttcataatattcatttgttattattccaccctatcacttctctcgtcatatcctagtattatcagttagttaaacacacaaagagatctgaacatcttaaataagactatttaagatgcataacttagattcgcaagatatcttctggtcattcaaaaacaatttgcgatatagatattcttataccatgagatagttatctggaccgctctcaaccatgcaagattaaatcagtgaaacataatcatatttgataacgagaaatgcatttttaaatgccttactcagaattatagcaaatacagattaatcgcaatttttcccggcaaaattacaaaatcatggtgtattgacatcatcaataaccaatgaaattatgcaattatatacggatagggaggttcttaacatggggctttgtagtcgttataaaagtcttacatgcaatagttgcagtatgcattgccaaataatgccagaagagagtccgcgtttgcagtattgcgcaaacagctgtttttgtatgtggcccgaagaaagtagttattttaatcgtggtgtggtagaaggtatcttaacaaaaaaccacaatgcgagattaagcggatatatttttgtcgattttagtgtaagttttttacgtctattccttgaaaaagactggattgactatcttgcaagtactgacatggggattgttttagtcagcgaccgcaatatgcaaagcttagctaattactggcgaaaacacaacagtgcaatatctgctgtcatatataatgatgatggtcttgatgttgccaatgaaaagatcagacaactatttattggtcgttatttaagttttaccggaggtaacacattaactcagatggaattcaccataatggggtatatggtttctggttataatccatatcagattgctgaagttctggatatggatatccgtagcatctacgcgtacaagcaacgaatcgaaaagagaatgggtggtaaaataaacgaattatttattcgtagtcatagcgtccaacattgatactcaacgaccagccagaatcatactctgtttatacgggcatttattgaaatgtccgtattttataaataggccgtcccctcaagagtaaacaccatagtatttaaaaccatcacacgaaaaattcagaagcattacgaaatatgaatttacaaacaatagtggcataaatgttaaccatgttaatttacgtaaagttttacgttgcaacattaaagcctcatttcaatcatcatgataaatataaaattaatatatatttatgccgtaaataccaatatacttagcaaactatgtgatctccatttcgattgatttagtgtttattgacgtatgtactggattattaacgataatatcgagttctggcctgagcaccgaaaattaataagcgtacataacgccgatcttaacgtcgttctgacaacgccagccagtcgatgtttaagtcttctacttgaagcttttcctgatgtggttgcacaacaagattttttcaccagagtctgggaagaagaaggtatgcgtgtgcctactaacacgttatatcagaacatatccattatcagacgcggatttcgcgctgttggtgatactacccacagcctaattgcaaccgtgccgagaagaggattcaagatccataatgacattaacatacaaaatcatgtaataaacagcagtacagacgcacatacacacaatgccccacctgccataaaagttaatgcgggatacaaagagagcattggtggcgcaaagaatttcaataacaaaatcctcaaacatataaaaagtcatctaattatgttgagcgcatttgtcataggcgcatattctgcatattggctatggaataataatcaaccgaagccatttttcaaggattacaagactgttgcggaaattaatggctgccattttaatgtaacagaagatacaattgatgggttgaaagagttcgataaatataaaacacggatactggatagcgggattaactgtaaaaaacatccgtggttatacttccctcttgcaaaatccagtccggggatgattgttatggcatgcaataaaaactataaccaacatgaagtggcaaactgtttaaccctgtcttaccgtgaggttaatcgtgattgattataaaaaaaacttattatttattttagtttttatcagtgggtttattctcttcactgtctattcttacactgcagaaaaaatgatatataacgaaacatgcactgcaaattgggtaatttttaatgaccagggacgagcaaatcttaccatcgactttatgtataacaaaaaaaataaaacaggaactgttgcgttgagtggaacctggcaacaaggtaacagagaaagtaaaagtatacggcgaaatattgaatacacatggattgaaaactatgacacagcccatttaacaagtaagaaagttaataagtttgagattatggatcaagttgatgatgatagacttgcacaacttattcctgatttttatgtctttccagaaaaaagtgtaagctataatatactaaagcaaggtaagcatgcttttattttgagcattggtaacagagcaataatgcattgtgcaaggtaaactaaaatagataacaaaaagatggaacctcgttaatcataaaacaataaaattaaatattctcgcagtatatggcagtctaaagcatcaaagatttgatcaacatctttcattttagacatctccttgcaatgtaaaatatcatgtatcaacaacatctggtgcaaatccaactgtcgaactcgacattcatcttagctcgattattattccttcgtacagtgcttgtaaacaatacagaaagaggattattaagaaccagtttactcagactatcaatagaggaaaggactaacgtttctttaaaagaattgatttcatcatctgttaaactaaactcatcattgacagatcgactgatataactgtttttaactttactctttacgttgactttattgacagaattaacattcacatatctactatttaatgtccaacttgttgtttgcgtgagaacattctcagcattaaggaatttttttaacggaatccttggtttctttttgctgtcgctatttacaatatcatgcatatagaccatttcatgaatctggctaaattcaatgtccattgtatacctcacatttttaccgtgactcgatgttactgttcaataatcaccttccatcaatactaaaattaatacccctaatgtgccgataacaaatatagtcattctacgtaacgtctccataaggtgatatttgacattatcagaagctgcgaattcggattttgctctaatcaaatgagagaaatgtaaaatgaagccacgaaatattaataatagcctaccactgcaaccattagttcctgatcaggagaacaaaaataagaaaaatgaagagaaatccgttaatccagttaaaatcacaatggggtctggtttaaattatattgaacaagaatctcttggaggaaaatatctaacacatgatttgagtataaagatagcggatatttctgaagagataattcagcaagcaatattatctgctatgagcatatataaatttagcataacagatgatttaatgagtatggctgtaaatgaactcataaaactgaccaaaatagagaataatgtagacctgaataaattcactactatatgcacagacgttctatccccccgcgtcaccagacataataaagaaaaaaacaaacgacattctacccttctcaaaaatcccctttttaattttcattgaaaaaatggcaattgatactatgaatccaggtcatacacattaaggcatttatgtaatgtcgtaattaagataactaataaggtgaatattagtaaaacaactaatgatgttattagtttgtagtgaacagtacttttaccaataatgaaaaatataccataagcaatgcaagcttaaaactcataatttaaaaaagataaatataaaaatatcaatgagtcaatcaataataatttggcatcacgagacacatcacagaggaatattatgagcacagaaacaattgaaatattcaataatagtgatgaatgggcaaatcaactaaaacacgcattaagcaaaggagaaaatctggcattactacatggtttaactcctgatatccttgatagaatatatgcatatgcattcgactaccatgaaaagggtaatataacggacgcagaaatttattataaattcttgtgcatttatgcgttcgaaaatcatgagtatctaaaagattttgcaagtgtatgtcagcccaaaaagaaatatcaacaagcatatgacctttacaaactaagttacaattacttcccgtatgatgactatagtgttatttatcgtatgggtcaatgtcagattggggctaaaaatatcgataacgcaatgcaatgtttctatcacattattaacaattgtgaggatgatagtgttaagagtaaagcgcaggcatatattgaactcttaaacgataatagtgaagataatggctaagcattacaatcatttggttaaatttgctggttatagtgcagttaaccactataaccagcacctcttatgttttcttaaatcagcatcttaaaacagttaagagcatactataaatcattatttttcaatgcgttagagaacaatctactttatcaaaattgaataaggctatttcagattacatcactgaattcctaagataaattagtgaacacaaccatagatatgtcaaatgtaatttcctgtagcgttaatgacacataaatatgaatagccataatttctattgcttaagcaggatgcaagaaaccaattttttcatagaggttaactaatggacttagaaaataaattcagttatcattttcttgagggattaacgctcacggaagatggaattcttactcaaggaaatgagcaagtttatattccacagaaagagttaggtgtattaatagtattacttgaatccgctggtcatgttgtactgaaagatatgatcatcgaaagtgtatggaaaaatattattgttagtgacgagtccctgacaagatgtatctattctttgcgctgcatttttgaaaaaattggctatgatcgttgcatagaaacaatctaccggaaaggttatcgtttcagcgggcaggttttcaaaactaaaattaatgaagataatactagtgactattccatagctatattccctttcactactagtttgaatacactggatccattaatacttaatcaggaattagtgcaaatcattagtaataaaaaaatcgatggtctctatacctatccgatggctgcgacaaatttttgtaatgatcacatatctcaaaatagtttcttgagcagattcaagccagattatttcgttacaggaagaataaaccagaataatgcagtgaacactttatacattgagttgatcgacgctaaaaaccttttcctcatcgccagtaatcatctccctgttgatgaactacataatacaagtcaatttattatagataatatccttcaaacggtacataaaccagaacgatctgtaagattagctaagcaggaccaaggatataagaatcattatttaagtgatgaaatgttagccggaaagaaagaactttacgacttcacccctgaaagcatttacagggccatgactatatttgatagattacaaaataaaagtgatatacagacgctaaaaacagaatgttattgccttctagcggaatgccatatgtctttggcacttcatggaaaaagtgaacttgaacttgctgctcaaaaagcattagagcttttagattatgtaagtgacataaccactgtcgatggaaaaattttagctattatgggactgataactggtctgtctggacaagcaaaagtatctcatatcttatttgaacaggctaagatacacagtactgatatagcctctctctactactatagggcactagtccactttcataatgaaaaaattgaagaggcaaggatttgtatagacaaaagtctacaactcgaacccagaagacgaaaagcagttgtgataaaagaatgtgtagatatgtatgtgcctaacccgctcaaaaacaacattaaactctactataaagaaactgagagtgaaagccatcgagttataattgacaacattttgaaattaaagcagctgacgagaatttgtatgcgataaatttttattgacgcaattttattatttagatgtatgcaacttgttatttaaacaacagagataaaaatatctaagatattcaccttattgcaagatatttaaaatgctctagagttaaaagtatgatgtaaagaccattggcctggacaattaaaaaagggagctttatgactaatccaatcggtatcaataatttatctcaaagtagtaatatagcgaatgcaacgggtgatgaagtcgtaagtttagataaacacatcaacaccagtgctactgatacagatcaaatacaagcatttatagttagtacatggatggcgccttttcaaaatgatatgtatagtgaagataatcctatcagtccttactataaaattgagtggtaaacgattgaccaaataaatcataacgagatacttttataatagtatctcgttcctttcattcaatcctcacacatgaaaaaatatgcgctcaccaaaagttaaattcttaaccatcttcacgttttgtatatttattacaaaaatgtctttcgccagcaactcttgctctaatgaagcaggaacaatgttcagaatcgaaccaaatttaattaaagctatcgctcttgttgaaagcaatctaaaaaaggatagcataggcaagaacagagataagaataacaatataaagagtttagattattggttaatgcagataaaccagatgcatattcccctgttaaaaaaacgtggaataataaaagatgaacgagatttgttagataacccttgtctgaacattaaaataggaaccgagattttatataaccattttagtcgttgtggagtaacgtggcaatgcctggggacttataatgcgggttttgcaatggataaccaaaaaaagagacagcaatatgccccaaaatatatattgtatataccaggcttaatgaactaaacaatcgtaaggcttcagcaaaatgagcctaaagcctcttttttttatatagtgcaaacacccatacgtaaagctgttttgatcaactcgataccactgtgaacatctaatttcttcatgatattgagtctatgagtttcgactgttttcctgcttaactgcaagaaattagcgatttctttgtttgttttaccatcagctatgagttgtaatatttcactctcacgatttgtaagttgattatcagaggaatacctggaagatattttttcacaatccatatgtacactatcaaaataagtgtaaccattactaatgctatcaatagcacgatttagtttcgccgggtgactggttttccatacgcatcctttcgcacctgcttcaagcaattttatactatcaatatacggcatctttgctacaaatgtaataatatgagcatctatcttatggcttttaacccattttacgagttcggcccccatcattccacctgcaaattctcctaaaataaatatttaggctgtagatttgttacactccgctatagctttcttcagatctttatagcccacttatttaacaacttgaaaataaggtgttttacctgggttgttacaaaaggattgcattgcgtaaacgctttttatttacaacaaaatggggaagtattacggcgaagataaattggagcgggcgaagggaatcgaaccctcgtatagagcttgggaagctctcgttctaccattgaactacgcccgcttcgagatgcgtaaggcattataaaccttacgctctccttagcaagtgccacgctgctgactgctgattaattcgccatcagcattttggcttgctgccctgaggcggcaagtaacgtagcggatcaattgccgttgcacggtaacgaatctggaaatgcaggcgaacagatgccgcatccgtgctccccatagtggcgattttttgcccagccttcacgctttgcccattatttaccagcatcgtgtcattatgggcgtaagccgtaatgtaatcttcactgtgtttaatcatgatgagattaccgtagccacgcagctggttgcccacatacaccacctttcctgcacccgcggcgtaaataggtgtaccccgtggagcactgatatcaatccctttattgccgccatctgctgtgctatacggcatgataactttccctgtcgttggccataaccaacaacgttgccctactggcggccaggaacttttcggtaccgcactactcggtgtaacgcttgcggttttggtcgtacttttggcggtacttttacgtgtaatactgctacttttcgccccacccagttttagtttctgaccaacttcaatggtgtaagggggggaaatgccgttcagtcgcgccagttcttttacgctggttcccgtggtgcggctaatacgatatagcgtatccccccgtttcacggtgtaaacggagccggaatacgttcctgtatcggaacttttgctaccgctacagcccgccaaaagcagtccaacgcttaacaacatcacgatacccagagattttttattcaggcgtcccgcactcaaaatctttcctcgcttaaaaaacaagacgccttatcatagcagccagcctcttgatacccaatctcttgcttctggaaaaacgtggtaatagagaaagaggttaatttcatttggcaaagggaagtatcatcagcaaaatattcgctgtagaggtatcgaacttcctgactttttaccctatttcccatcctgatgcgtaataatcccaatttatcacattgattttatcgccactcatattgatacgtatcactgcccctattcagagtcctgtttcgtatcatatctgtgtttttttaacgtcatcacacttcctacctcccctaacgcttatcgtcgtttctggcgtaaatcttgcctgcttagactaaatctttgccataagaaccaaatgttcaaatcgaggggatttctatggaagcgcgggaagcaaccgctacgggtgaatcatgcatgcgcgtcgatgccattgctaaggtcaccgggcgggcacgatatactgacgattatgttatggcgggcatgtgttatgcgaaatatgtacgtagccctatcgcacatggttatgccgtaagtattaatgatgaacaagccagaagtttgccgggcgtactggcgatttttacctgggaagatgtgcctgatattccattcgctacagctgggcatgcctggacacttgacgaaaacaagcgcgataccgccgatcgcgcactgctaactcgccatgttcgtcatcatggtgacgccgttgccatcgtcgtggcccgcgatgaactcacggcagaaaaagcggcgcaattggtcagcattgagtggcaagaattacccgttatcaccacgccagaagcggcgctggcagaagacgctgcaccaatccataacggtggcaatttactgaaacaaagcacgatgagcacgggtaatgtccaacaaacaatcgatgccgccgactaccaggtacaggggcactatcagacccccgttattcaacattgtcacatggaaagcgtaacaagcctggcgtggatggaggatgacagccgaattaccatcgtttccagcacccagatcccgcacattgttcgccgcgtggttggtcaggcgctggatattccctggagttgcgtacgagtcatcaaaccatttgtcggtggcggttttggtaataaacaggatgtactggaagagccaatggcggcattcctgaccagcaagcttggcggcattccggtgaaagtttcccttagccgtgaagagtgtttcctcgcaacccgtacccgccacgcttttaccattgacgggcaaatgggcgtgaaccgcgacggaacattgaaaggttatagtctggatgttctgtctaacaccggcgcttatgcatctcacgggcactccatcgcttctgcgggggggaataaagtcgcttacctttatcctcgttgtgcctacgcttacagtagtaagacctgctataccaacctccccagcgctggtgcgatgcgtggttatggcgcgccacaagtcgtatttgccgttgagtctatgcttgatgacgccgcgacagcgttaggtattgatcctgttgaaattcgtttacgcaacgccgcccgcgaaggagatgctaatccgctcacgggcaaacgtatttacagcgcagggttgccggagtgtcttgaaaaaggccggaaaatctttgaatgggaaaaacgccgtgcagaatgccagaaccagcaaggcaatttgcgccgcggcgttggcgtcgcctgttttagctacacctctaacacctggcctgtcggcgtagaaatagcaggcgcgcgccttctgatgaatcaggatggaaccatcaacgtgcaaagcggcgcgacggaaatcggtcagggtgccgacaccgtcttcagccaaatggtggcagaaaccgtgggggttccggtcagcgacgttcgcgttattagtactcaagataccgacgttacgccgttcgatcccggcgcatttgccagtcgccagagctatgttgccgcgcctgcgctgcgcagtgcggcactattattaaaagagaaaatcatcgctcacgccgcagtcatgctacatcagagtgcgatgaatctgaccctgataaaaggccatatcgtgctggttgaacgaccggaagagccgttaatgagcttaaaagatttggcgatggacgctttctaccaccctgaacgcggcgggcagctctctgctgaaagctccatcaaaaccaccactaacccaccggcgtttggctgtacctttgttgatctgacggtcgatattgcgctgtgcaaagtcaccatcaaccgcatcctcaacgttcatgatagtgggcatattcttaatccactgctggcagaaggtcaggtacacggcggaatgggaatgggcattggctgggcgctatttgaagagatgatcatcgatgctaaaagcggcgtggtccgtaaccccaatctgctggattacaaaatgccgaccatgccggatctgccacaactggaaagcgcgttcgtcgaaatcaatgagccgcaatccgcatacggacataagagtctgggtgagccaccaataattcctgttgccgctgctattcgtaacgcggtgaagatggctaccggtgttgcaatcaatacactgccgctgacgccaaaacggttatatgaagagttccatctggcaggattgatttgaggataacatcatgtttgattttgcttcttaccatcgcgcagcaacccttgccgatgccatcaacctgctggctgacaacccgcaggccaaactgctcgccggtggcactgacgtactgattcagctccaccatcacaatgaccgttatcgccatattgttgatattcataatctggcggagctgcggggaattacgctggcggaagatggcagcctacgtatcggctctgcaacgacatttacccagctaatagaagatcctataactcaacgtcatctcccggcgttatgtgctgcggccacgtccattgctggaccgcagatccgtaacgtcgctacctacggtggaaatatttgcaacggtgccaccagcgcagattctgccacgccaacgctaatttatgacgcgaaactggagatccactccccgcgcggtgttcgtttcgtcccgattaatggctttcacaccgggccgggcaaagtgtctcttgagcatgacgaaatcctcgtcgcctttcattttccgccacagccgaaagaacacgcgggcagcgcgcattttaaatatgccatgcgcgacgcaatggatattagtacgattggctgcgccgcacattgccgactggataacggcaatttcagcgaattacgcctggcatttggtgttgccgcgccaacgccgattcgctgccaacatgccgaacagactgcacaaaatgcgccattaaacctgcaaacgctggaagctatcagcgaatctgtcctgcaagatgtcgccccgcgttctagttggcgggccagtaaagagtttcgtctgcatctcatccagacgatgaccaaaaaagtgattagcgaagccgtcgccgcggcggggggaaaattgcaatgaatcacagcgaaacaattaccatcgaatgcaccattaacgggatgccttttcagcttcacgccgcaccaggcacgccgctcagcgaattactccgcgaacaaggactgctaagtgtcaaacaagggtgctgcgtgggtgaatgtggtgcctgtacggtgttggtcgacggcacagcaatagacagttgcttataccttgccgcctgggctgaaggaaaagagatccgcacgctggaaggtgaagcgaaaggcggaaaactttctcatgttcagcaggcttatgcgaaatccggcgcagtgcagtgcgggttttgtacgcctggcctgattatggctaccacggcaatgctggcgaaaccacgcgagaagccattaaccattacggaaattcgtcgcggactggcgggaaatctttgtcgctgcacggggtatcagatgattgtaaatacagttctggattgcgagaaaacgaagtaaaaggatatccggcctgaattcaggccggattcactgaggttatgtgtttaacaactcatatttcttaatcttgcgatagagcgtagcaatgccgatgcccagttcatcagcaacttgcttcttgctgttatgacgactaagcgcctcgcggatcatttgcttttccatctcctccagcgccgtgccgcccgcatcatcgagactcaggtgcgcctcactgacctctgttacatcactttgctccgttgtgccattattcagcagatttggcggcaatagcgtgctgtcgataacttcaccactaggaaccacgttaaccagatattccatcaaattgcttaactcgcgcaggtttccgggccaacgatgcttacgcaatatttcgacgacatcgggagcaatgccaggataaacgcttcccagacgacgggtatgcagatgtaaaaagtaatgcaccaatagttcaatatcttcctgacgttcacgcagcggtggcagagttatcgggataacattaagtcggtagaagagatcttcgcggaatttaccttcggcaatgaactgggccaaattctgattagttgcagaaatgatgcgaatgtcgacttgtattgggctactggcaccaatcggcagaatttcacgtgcctcaatagcgcgcagtaatttagcctgcaacattaatggcatatcacctatttcatcgagaaacagcgtgcccgtattcgccgcctgaatcaaccctgttttaccgttggcagaagcgccagtaaatgcacctttaacataaccgaacagttcgctctccagaagctgctccggaatcgcggcacagttgatagcaataaagggtttattccgtcttccgctcaacttatggattgcacgggcgacgacttctttacccgtgccgctttcaccaaccaccataacgctggatgggctgggtgcaatacggctaatgagtcgttttaattgccgcataacacggcactcgccaaccaattgttcaatatgcggttcatcaggtgcatttgctacagaaaaactggtatggctttggtgaaacgccattaaaaataattgtcggccctgaatgttatgcaattgaccaatgattaattcacttttatcgtcccaactaacaatatgctgcatatgtccatgggtaaaattactctcaaatgttaatggtctgaaacggataggtttcccaataatattattttgcacaacaccaagtgtttttaaggcagtctgattaacaaactgaacccgattttcatcatctacaactaatacgccctgatccatattatcgatcatggtcgcaaatattttactgatgttatctcctggcccctgatcctccagaagtttgctaacaaaaatggtggatatatggcgaacataatcagaaaattcgcgtaaattatcactgatatgctcttgttgctcgtgggtaacggcaatcaaacttatcaccccaacacaacgatcctgtaaaatgacaggcgtacccagaaatgctttttcgcggcaattttctttactatcgcaaccttcgcaaaggggatcgaagcgagactgtgtcacaactttttcagttttcgtttccaggacgtggcggagcaggcgactgttgccgctcaactggcgaccaagaaacttcccatacgcgcccgttccggcaacgcgacacaagttttcatcaacgatctcaacctcaagctgcaaaaacgctggcaagcattctggcaaaacgctgaattgtcggttgaatttgcatcaatacactctgcgtagtagcaagctccatagctttaccttccagacttacttaaaagtcgatcattgaagacgttgatggttcacagatcatgatgatattaactcaggcgaaattggctttgataaaaacataagatttttatcattttctaatgaaattatggaagagatatcacatttctatatcaatatgagaattacggcggtgagtttatcaaactgaagagagatagcctgcccctttatcttatttctgatacttagcagcaaataaataacgcgataaaaaaagccaaacgttttcgtattttacaaacaaccagaagctggcatcaatttgtgatcaaccccacacattatccgtcaaattagtcttttgcagccgcgcggataattctggcacacttattgttagtcccaggtatagctgtgaaaacaccaatcactttggcaagtcacagtgaaataaaccactttgcctgtcattccactaccgggactttatgatgaaaactgttaatgagctgattaaggatatcaatagcctgacctctcaccttcacgagaaagattttttgttaacgtgggaacagacgccagatgaactgaaacaagtactggacgttgccgcagcattaaaagcactgcgtgctgaaaacatcagtaccaaagtctttaatagtggattaggtatttccgtattccgcgacaactccacccgtacccgcttctcttatgcttccgcgcttaacctgctcggccttgcacaacaagatctcgacgaaggcaaaagtcaaatcgctcacggcgaaaccgtgcgtgaaaccgccaatatgatctccttctgcgccgacgctattggtattcgcgacgatatgtatctgggcgcaggcaacgcctatatgcgtgaagttggcgctgcacttgatgacggttacaagcagggtgtactgccacagcgtccggctttagtgaacctgcaatgcgatattgaccacccgactcagagtatggctgacctcgcgtggttacgtgaacactttggtagtctggaaaacctgaaaggtaaaaaaatcgccatgacctgggcctactctccaagctatggcaaaccgctctctgtaccacaaggcatcatcggtctgatgactcgcttcggtatggatgtcaccctggcccatccggaaggctacgacctgatcccggatgtggttgaagtggcgaaaaacaatgctaaagcctccggtggtagcttccgtcaggtcaccagcatggaagaagccttcaaagacgcagacatcgtttatccgaagagttgggcaccttacaaagtgatggaagagcgtactgaattgctgcgtgcgaacgatcacgaaggcttaaaagcactggaaaaacagtgtctggcacagaacgcgcaacacaaagactggcattgtactgaagagatgatggaactgacccgtgatggcgaagccctgtacatgcactgcctgccagctgatatcagcggcgtatcctgtaaagaaggtgaagtgactgaaggcgtattcgaaaaataccgtatcgctacctacaaagaagccagctggaagccttatatcatcgccgcgatgatcctgtcccgtaaatacgccaaaccaggtgcactgctcgagcaactgctgaaagaagcgcaagaacgcgtgaaataacccctcgggccgatcagctggtcggccctctatttccagaggccaaaaggataggatatgtccgttttcagtttgaagattgatatcgccgataacaaatttttcaacggcgaaacaagtccgctctttagccaaagccaggccaaactggcgcgccagttccaccagaaaatagctggttatcgcccaacaccgctttgtgcgctggacgatctcgcaaacctttttggtgtgaagaaaattctcgtcaaagacgaaagtaaacgattcggtctgaacgccttcaaaatgcttggcggtgcgtacgccatcgctcaattattgtgtgaaaaatatcatcttgatatcgaaacgctgagttttgagcacctgaaaaatgccatcggcgaaaaaatgactttcgcgaccaccaccgacggcaaccacgggcgcggtgtggcgtgggcagcacagcaactcggacagaatgcggtgatttacatgccgaaaggttctgctcaggaacgcgttgacgccattctgaacctcggtgccgagtgcatcgtcacggatatgaactatgacgataccgttcgcctgaccatgcaacacgcgcagcagcacggctgggaagtggtacaggacacggcatgggaaggttacaccaaaatcccaacctggatcatgcaaggctacgcaaccctggcagatgaagccgtcgagcaaatgcgtgaaatgggcgtaaccccgacgcacgttctgctgcaagccggtgtcggagcaatggccggtggtgtgctgggttatctggtcgacgtctatagcccgcaaaatctgcacagcattattgttgaacctgacaaagctgactgtatttatcgctccggcgtcaaaggcgacatcgtcaacgttggcggtgatatggccaccatcatggcaggcctggcctgtggcgaacctaacccgctgggctgggaaatcctacgtaactgcgccacccaattcatctcctgccaggacagcgttgccgcattaggtatgcgcgtgctgggtaatccgtacggcaacgacccgcgcatcatctccggtgaatccggcgctgtcggtttgggcgttctcgcagcggttcattatcacccgcaacgtcaaagcctgatggaaaaactggcgctgaacaaagatgccgtggtgctggttatcagcactgaaggcgacaccgacgtgaagcactaccgcgaagttgtctgggaaggcaaacacgctgtagcaccttaatcaccctattggaactgctccctgcaaaacggggagtaaaaaatctggagaaaaataatggctaagaatattccattcaaactgattcttgaaaaagcaaaagattaccaggcggatatgactcgcttcctgcgcgacatggttgctattcccagtgaaagctgcgacgagaaacgcgtagtacatcgtattaaagaagagatggaaaaagtcggcttcgataaagttgaaatcgacccgatgggcaacgttctcggttatatcggccacggcccgcgtctggtggcaatggacgctcatatcgataccgtcggcattggcaacatcaaaaactgggacttcgatccgtacgaaggcatggaaactgatgaactgattggtggtcgcggtacttccgaccaggaaggtggcatggcctctatggtttatgccggtaaaatcattaaagacctcggtctggaagatgaatataccctgctggttaccggtacggtgcaggaagaagactgcgacggtctgtgctggcagtacattattgaacaatccggcattcgcccggaatttgtggtcagtaccgaaccaaccgactgccaggtataccgtggtcagcgcggtcgtatggaaattcgtattgatgttcagggtgttagctgccacggttctgcaccagaacgcggtgataacgccattttcaaaatgggtccgattcttggcgaattacaagaactctcccaacgtctgggttatgacgaattcctcggcaaaggcaccctcaccgtttctgaaatcttcttcacatccccaagccgttgcgctgtagcagacagctgcgcagttagtatcgaccgtcgtctgacctggggcgaaacctgggaaggcgcgctggacgaaatccgcgccctgcctgcagtacagaaagctaacgcggttgtttctatgtacaactacgaccgtccgtcctggactggcctggtttacccaaccgaatgctacttcccgacctggaaagtggaagaagatcacttcaccgttaaagcactggtgaatgcctacgaagggctgtttggcaaagcgccggttgttgataagtggaccttcagtactaacggcgtatctatcatgggccgtcacggcattccggtgatcggctttggcccgggtaaagaacctgaagcgcatgcacctaacgaaaaaacctggaaatctcacctggtgacctgtgccgcgatgtacgctgcaatcccgttaagctggctggcaacagagtaattactcttcacttattcccctccggttcgccggagggtttttggagtttgctatgcgcgtattgatcaaaaacggcactgtcgttaacgcagatggacaagccaaacaggatttgctgattgaaagcgggattgttcgccagttgggcaacaatattagcccgcagctcccgtatgaagaaattgatgccactggctgttacgttttccctggcggcgtggatgtccatacgcatttcaatattgatgtcggcatcgcgcgcagttgtgatgatttttttaccggtacccgcgcagctgcgtgtggcggtacaacaaccattattgaccatatgggatttggcccaaacggctgtcggttacgccatcaactggaggtttatcgtggttatgccgcccataaagcggtcatcgattacagctttcacggtgtgatccagcacattaatcacgcaatcctcgacgaaatcccgatgatagtcgaggaaggactgagcagttttaaactctatttaacctatcaatacaaactcaacgatgacgaggttttgcaggcattacgccgcttgcatgaatccggcgcgctgaccaccgtgcacccggaaaatgatgcggctatcgccagcaagcgggcggaatttatcgccgcagggttaaccgcgccgcgctatcatgccttgagtcgccctctggaatgcgaagcggaagccatcgcccgcatgattaacctggcacaaattgccggtaacgccccgctctatatcgtgcacctgtctaacggcttaggtctggattatctgcgtcttgcccgtgcgaatcaccagccagtctgggttgaaacctgcccacaatatctcctgttggacgaacgcagttacgatacagaagatggcatgaagttcattcttagcccaccgctgcgtaacgtacgcgagcaggacaaactgtggtgtggcatcagcgatggtgcgattgacgtggtggcaaccgatcactgcaccttcagcatggctcaacgcctgcaaatttctaaaggcgatttcagtcgctgcccaaatggcttacccggtgtggaaaaccgcatgcagttactgttttccagtggcgtgatgacgggacgtataacaccggaacgctttgttgaattaaccagcgcaatgcccgccaggttgtttggcctgtggccgcaaaaaggattattagcgcccggttccgacggcgacgtggtgattatcgacccacgtcagagccaacaaattcagcatcgccatctccacgacaacgccgactacagcccatgggagggttttacctgtcagggcgcgattgtcagaaccttatcccgtggtgaaacgattttctgtgacggcacctttacaggcaaagccgggcgaggtcgtttcctgcgacgcaaaccgtttgtccctcccgtgctctaaccactgccagggatctatacacaatcaagaatgatgagtgaggaaaaatgagtaagaaaattgttctcgccctgggcgggaatgcgctgggcgatgacctggccgggcaaatgaaagcggtaaaaattacttctcaggcaattgttgatttaattgcccagggacatgaagttatcgtcactcatggtaacgggccgcaggtgggcatgattaaccaggcctttgaagctgccgcaaaaactgaagcgcacagcccaatgctgccgatgtctgtctgtgttgcattaagccagggttatattggttacgatctacaaaacgctttaagagaagaactgctttctcggggcattaataaacctgtagcaacgctggttactcaggtcgaagtcgacgctaacgatccggcattcctcaacccgaccaagccgatcggtagcttctttaccgagcaagaagcagagcaactgacaaaacagggttacactctgaaagaagatgctggtcgcggctatcgccgtgttgttgccagcccaaaaccggttgatatcattgaaaaagaaacggttaaagctctggtagatgcaggtcaggtggtgatcaccgttggcggtggtggtatccctgttattcgtgaaggtaaccatctgcgtggtgccagcgcggttatcgataaagactgggccagcgcccgtttagcagaaatgattgatgccgatatgctgatcattctgactgcggtagaaaaagtggccattaacttcggtaaagagaatgaacagtggctcgatcgcctgagtttaagtgatgctgaacgctttatcgaagaaggtcattttgcgaaaggttctatgctgcctaaagtggaagctgccgccagctttgctcgctctcgcgcaggtcgtgaagcactgattaccgtattgagcaaagcgaaagaagggattgaaggcaaaacaggaacggtgatttgtcagtaatttaaaggccgggtgggtaataccatccggccaaagattgtcaagtaagtgcgctttgttgatgccggatgcggcgcgagcgccttatccgtcctacaaaacatcgcaaattcaatagattgcaatgcacttgtaggcctgataagcgtagcgcatcaggcaatttggcgtttgtcatcagtctcaggccgggtgggtaataccatccggccattttcatttaagccacttccagcacttcttttgtcgctttcacgccctgatgcatcaacatcattaacgcctcaagtacgccgccgccaatcgcccgggctttatcagaaacgctggtgaaatcagcggtttcaccacgaggatcgatatcaccaattttaaaaccaccaaccactgccaggccgtcgttcaacaagccacgcaccatccccgtcaacggtgctttaatttcatgctcaccaatccaggcaatcacatcgccctctttcaccagatcgcctaatttcacgttggatcgcataatgcctgcagcaggagcacggatcacccgtcgggtggtatgccccataatattgccaggaacaccggtattctcctgcgcacaaccagagtaaatcacctgaccgagccagtgcccgcgatttgtttcaattaccgcatgacaatccttcccagcagtaaagcccggcccaagcgcgattgttactggtgccatatctgcccgcgttcccaaattctgtttcgccagaatagcgtccaccacgcaaagcggtttcagttcatcaagcaaactacaggcgggatctaccatcacaggaatgaatccgcgttcggtaagtttcatcgcttccgcagagctggttgccaggcgagcagtgacgccttcgaccgtcatttcgccatcgaacacggcctgggcaaacgccacggtacaacgaatcactgtcggtttttccacttccagcatgatcactttaaaacccgcatgatacagacgtagcgccacaccactggcgatatctcccgcaccgcgaatcaccaccagctggtgtccggaaggatgagaaggtttcatcatcagcccacccggcgcgttatttttcacctgtaatatttctgccagcacgctgatggcgatctcctgcggcgtttccgcacctatgttgtaaccaacgggcgcatgtaaacgggcaatatgttcttcagccacgcctttctcacgcaattgacgcaggaaaagctgaaccttgcgacgacttgccagcaaccccaaccatgcaatgggctgttcaatgagtttgtcgagggcttcacgatcctgattattcgtggcaatcaggacaaaattatcagggcgaatatccagtgcttccactgccgcaccaaagctctcagcatggagaagcgtggtacttggtgggaatagttcaggattgaggctttcgcgataaatatcagcaacggcaatatcaaatcctaatagcgccgcactctgggctatcgcccggttgacatgccccgcgccaatcaacaccagacgtggacgcataccatggacgctgataaatacactcattgcacctccacaatcactcccgacagcatccgcaccgttacgagccatacgtccatggaataatcgcggcttacgttcctgcaatgcctgaaggctctcttcaatcaccttccgctcaaccattccgccaccaattgtaccgacgatagaaccatcggcgcgcactaacatttgtgcagaatggcggggagtgctgcctcggctatcaacaatttgcgccatagcaaacggacaattttgctcttcgagttttgcagcctctgtgaaaatattcataccaacctcaatggatatcctttcagtaacccggaatacccgggccgttaattcacaaatctgcgcgcgattgcaggatgttcttgtatatcgcccagccagattgcctctacgtcgtgttgttgcagcggttgaaggagctcgctttgtgcaatcgcattctcacattgagaaaaacggttaatgaaccagactcgccgacaaccttgcggtacgtttttaaacgccccctgagggtggcgaaccagcgcaacgagatcgctcagttgcaaggttgcatcaggtgttaacccggtaatatcagcaaactggctccagcgatggacattttctgtgctcactttcgcgcccaaagtatgtcctcccatcacagcaatcacgcagcaactgcttttgggtatgcaaggttcgtgctcatcaggcgcttttaacggcattccacggctgccatctgcttcaatgagaattacgtcacactctggtcgttgcaccagtgcatcaatcgcttctggcgtaaatccctgcacttttccctggttcgctttccagctgtgaaaacaaaaactaatgggggatgtaagagacgcatgaggaagcatggcgggatcacgacagaaaaccacgggccagtgagacgttggcataaacatatgtgtcgtcgtcgtgattaacacacgcctgccgctagcctggagcagttctgccagccaaaaaagcaagctggttttccccccagcaccaacaacagaaatcacagtgggacgtttctgcgcacctaaatcaatgactaatgcgcttgggtcaactatacttttcacgagtctttatgacctctctgggataaattatccccaacttaatccatcaggaagtaacgcaattatcaggcgttattagcccctataaataatggaaccactatgagtgccatcgactgtataattaccgctgccggattaagtagtagaatggggcaatggaaaatgatgttaccctgggaacagggaacaattcttgatacaagtatcaaaaatgcgttgcagttttgtagccgaattattttagtcaccggctatcgtggtaatgaactgcacgaacgttatgcgaaccagagcaatatcactattattcacaacccagattatgcgcagggtttactaacatccgtcaaggccgcagtacccgcagtgcaaacagaacattgttttctcacccacggtgacatgccaaccctcaccatcgatatttttagaaaaatctggagcttacgaaatgatggcgcaatactgccactccataatggcatccccggccatccgattttagtgagtaaaccatgcctgatgcaggcaatccaacgacccaatgtcaccaatatgcgtcaggcactccttatgggagatcattattccgtcgaaatagaaaatgcagaaataattttagatattgatactccggacgactttattacagcgaaggaaaggtatactgaaatttaaaaaacgtagttaaacgattgcgttcaaatatttaatccttccggcactcattatcataatgataaggaatcactgattttgagaaaagagaaaaattgataaatgggctggcaataataattttcaggagtgattttaattctcatttagcacctgtgagttcattcacaaaaagcccttaagtttcgagccgcctcacatttttttatatttcccgccaaacctggcaagagtggtgcgattgttgctctatccccctaaaccaccggatttctcaacaccggtcactcaatgatatctgtataagctaaggagagggttatgggggatattatgcgtcccattccgtttgaggaacttttgacgcgcatatttgatgaataccaacaacaacgcagtatctttggtattcccgagcaacagttttacagtcctgtaaaaggtaaaactgttagcgtcttcggtgaaacctgtgccactcccgtcggccctgccgctggcccgcacacgcagctcgcgcaaaatattgtcacttcctggctgactggcggacgcttcatcgaactaaaaaccgtccaaattcttgaccgcctggagctggaaaagccctgtatcgatgccgaagacgagtgctttaacaccgaatggtctaccgagtttaccctgcttaaagcctgggatgaatacctcaaagcctggtttgccctgcaccttctcgaagcgatgttccagccttctgattccggtaaaagcttcatctttaatatgagcgtcggttacaacctcgaaggtattaagcaaccgccgatgcaacagttcatcgacaatatgatggacgcatctgaccatccgaaattcgctcaatatcgcgatacgctgaataaattactccaggatgacgcatttttagctcgccacggattgcaggaaaaacgcgaaagcttgcaagccttacccgctcgcatccccaccagtatggtgcatggcgtcaccctctccaccatgcacggctgtcctccgcatgaaatcgaagccatttgccgctacatgctggaagaaaaagggctcaacacctttgtgaaacttaacccgaccttactggggtacgcgcgtgttcgtgagatcctcgatgtctgcggtttcggttacataggcttaaaagaagagagttttgatcacgacctcaagctgacgcaagcactggaaatgctggaacgcctgatggcactggcaaaagaaaaaagtctcggctttggcgtaaaactgactaacactctcggcaccatcaacaataaaggcgcactgcctggtgaagagatgtatatgagtggccgtgcgctgttcccgctctccatcaatgttgcagcagttctctctcgcgcctttgacggcaaactgcccatttcttattccggtggtgccagtcagctgactatccgcgatatttttgatacaggtattcgccctattactatggcaaccgacctgctgaaacctggcggctatctgcgcttaagtgcctgcatgcgcgagctggaaggctccgacgcctggggacttgaccatgttgacgtcgaacgactgaacagactggcagcagatgcgttaaccatggaatacacccagaaacactggaagccagaagagcgtattgaagtggcagaagacctgccgctgaccgactgctacgttgccccctgtgttactgcctgcgctatcaagcaagatattccggaatacatccgtctgcttggcgaacaccgctatgccgacgcgctggaactcatctaccaacgcaacgctctgcccgccattaccggtcatatttgcgatcaccagtgccaatacaactgtacccgcctggattacgacagtgcgctgaatatccgcgaactgaaaaaagtcgcgctggaaaaaggttgggatgaatataagcaacgctggcacaaaccagccggttctggtagtcgccatccggttgccgtgattggtgcaggtccggcgggtctggcagcaggttacttccttgccagagcgggccatccggttacgctgtttgaacgcgaagccaatgcgggcggcgtggtgaaaaatatcattcctcagttccgtattcctgcagagttaattcagcacgatatcgattttgttgccgctcacggcgtgaaatttgagtatggctgcagtcccgatttaaccattgagcagttaaaaaatcagggcttccactatgttctgattgccaccggcactgataaaaatagcggtgtgaaactggcgggcgacaaccaaaatgtctggaaaagtctccccttcctgcgtgaatacaacaagggtacagcgctcaagctgggcaaacatgtggtcgttgtcggggcgggtaacaccgcaatggactgcgctcgtgcggcgttacgcgttccaggcgtagaaaaagcaacgatcgtttaccgtcgtagtctacaagagatgcccgcatggcgcgaagagtatgaagaagcgttgcacgacggcgtagagttccgtttcctgaataatccggaacgtttcgatgctgatggcaccttaaccttgcgcgttatgagccttggcgaaccggatgagaaaggtcgtcgtcgtccggttgaaaccaatgaaacagtaacactgcttgtagacagcctgatcaccgccattggtgaacagcaggatactgaagccctgaatgcgatgggcgtgccgctggacaaaaacggctggccagacgtcgaccataatggcgaaactcgtctgactgacgtctttatgatcggcgacgtacagcgcggaccatcctccattgtcgctgctgtcggaaccgcgcgtcgggcgaccgatgccatccttagtcgggaaaatatccgttcccaccagaacgataaatactggaacaacgtcaatccagcggaaatctatcaacgtaaaggcgatatctctatcacgctggtgaacagtgacgatcgtgacgcgtttgtcgcccaggaagccgctcgctgcctcgaatgtaactacgtttgcagcaagtgtgtggatgtctgcccgaaccgcgccaacgtctccattgcggtcccaggcttccagaaccgtttccagacgctgcacctcgacgcttactgtaacgaatgcggcaactgcgctcagttctgtccgtggaacggtaaaccgtacaaagacaaaatcaccgtcttcagcctggcgcaagactttgataacagcagcaacccaggcttccttgtggaagattgccgggtacgagtacgtctgaataaccaaagctgggtgttaaacatcgacagcaaaggtcagtttaacaacgtaccaccggagctgaacgatatgtgccgcatcatcagccatgtccaccagcatcatcattatctgctgggccgcgtggaggtgtaatcatgttgattctgaagaatgtcactgcggtacagctacacccggcaaaagtgcaggaaggcgttgatatcgccatcgaaaacgatgtgattgtcgctatcggcgatgccctgacgcaacgctaccccgacgccagcttcaaagagatgcatggccggattgtgatgccagggattgtctgcagccacaaccatttttacagcgggctttcccgcggaattatggcaaacatcgcccctttgcccggatttcatcagtacgctgaaaaatctctggtggcggctcgatcgcgcccttgatgaagagagcctctattacagcggactgatttgttccctggaagcgattaagagcggatgtacaagcgttatcgatcaccatgcctctccggcgtatatcggcgggagactctccacattgcgcgacgcatttttaaaagttggcctgcgcgcgatgacctgttttgaaactactgaccgtaacaacggcatcaaagagttgcaggaaggtgtagaagaaaacatccgtttcgcccgtttgattgatgaggcgaagaaagcgacaagcgagccgtatctggtggaagcacatatcggtgctcacgcgccgtttaccgtgccggatgccggtctggagatgctgcgtgaagccgtgaaagccacaggccgtggtttgcatattcacgctgcggaagacctttacgacgtttcctacagtcaccactggtacggcaaagacctgctggcacgactggcgcaattcgatctcatcgacagcaaaacgctggtcgctcatgggctgtacttgagcaaagatgacatcaccctactcaatcagcgcgatgcgttcctggtgcataacgcccgtagtaacatgaacaaccatgtcggctacaaccatcaccttagcgacatccgcaatctggcgttgggaacggacggcattggtagcgacatgtttgaagagatgaaatttgccttctttaaacatcgcgatgcgggtggtccgctgtggcctgacagttttgccaaagccctgactaacggtaacgaactgatgagccgcaactttggcgcgaaatttgggcttctggaagccggttacaaagctgatttaaccatttgcgattacaacagcccgacgccgctgctggcagacaatatcgccgggcatatcgctttcggtatgggcagtggcagcgttcacagcgtgatggtcaatggtgtgatggtctatgaagaccgtcagtttaacttcgattgcgattccatttatgcacaagccagaaaagccgctgccagtatgtggcgtcggatggatgcgctggcataaatgacagatgccctcttcccgcagggaagagggttaaataaggaaagaagatgattgaacaatttttcaggcccgactctgtcgaacaggcgctggaactgaagcgccgctaccaggatgaagccgtctggttcgccgggggcagcaaactcaatgctacaccaacccgtaccgataaaaagattgccatttccttacaggatctggaactggactgggttgactgggataacggtgcactgcggattggcgcaatgtctcgcttgcagccactgcgtgatgcgcgatttattcctgcagcgctgcgtgaagccctcggttttgtttacagtcgccatgttcgtaatcagagcaccattggtggtgaaatcgccgcccgccaggaagagagcgtgctgcttcccgtcctgttggcactggatgctgaactggtttttggcaacggcgaaacgctgagtatcgaggactacctggcctgcccatgcgatcgcctgctaaccgaaattatcattaaagatccgtatcgcacctgtgcgacccgcaaaattagccgttctcaggcaggtttaaccgtcgtgacggcagccgttgcaatgacagaccacgacggtatgcgaattgcgctggatggcgtcgccagtaaagcactgcgtctgcatgatgtcgaaaaacaaaatctggaaggcaatgcacttgaacaggctgtcgccaacgccattttcccgcaggaagatttgcggggcagcgtggcctataaacgctatatcacgggagttctggtagccgacctgtatgccgactgccaacaggctggggaggaagccgtatgatcatccactttactttaaatggcgcgcctcaggagctaaccgttaatccaggcgaaaacgtgcaaaagctgttgtttaacatgggaatgcactctgtacgcaacagtgatgatggtttcgggtttgccggttctgacgcaataatctttaacggtaatatcgttaacgcgtccttgcttattgccgcacagttagagaaggcagatattcgtaccgcagaatctctgggcaaatggaacgagttaagtctggttcaacaggcaatggttgatgttggcgtggtgcagtctggttataacgatccagctgcagctctgattatcaccgatcttctcgatcgcatcgccgcacctacccgcgaagagatcgacgacgcgctttctggtttgttcagccgcgatgctggctggcagcaatactatcaggtcattgaactggcggttgcacgtaaaaataatccgcaggccaccattgatatcgctccgactttccgtgacgacctagaagtcattggtaagcattatcctaaaactgatgccgcgaaaatggtgcaggcgaaaccctgctatgttgaagaccgcgtaacggctgacgcctgcgtcattaaaatgttacgtagcccacacgctcacgcactgattactcatctggatgtcagcaaagctgaagccttaccgggcgtcgttcacgttattactcacctgaattgcccggatatctactataccccgggtggtcagagcgcaccggaaccgagtccgcttgaccgccgtatgttcggcaagaaaatgcgtcacgtcggcgatcgtgttgctgcggtcgtcgcagaaagtgaagaaattgcgctcgaagcactgaagctcatcgacgttgaatatgaagtgcttaagccggtaatgagcatcgacgaagcaatggcggaagatgcgcctgtcgtgcacgatgaaccggtggtgtatgttgctggtgcgccagatactctggaagacgataacagccatgcagcccagcgcggcgagcatatgatcatcaacttcccgatcggttctcgccctcgcaaaaatatcgccgccagtattcatggtcatattggcgatatggacaaaggctttgccgatgccgatgtgatcattgagcgaacctataacagtacgcaagcgcagcagtgcccgactgaaacacatatctgctttactcgtatggacggcgatcgtctggttatccacgcctccacccaggtaccatggcacttacgccgccaggtcgcgcgcctcgtgggcatgaaacagcataaagttcatgtcattaaagagcgagttggcggcggttttggttccaaacaggacatcctgctggaagaagtgtgcgcctgggcaacctgcgtgaccgggcgtccggtactgttccgctacacccgtgaagaagagtttattgctaacacctctcgtcacgtcgcgaaagtcaccgtcaaactgggagcgaaaaaagatggtcgcctgacggcagtgaagatggatttccgcgccaacactggcccttacggcaaccacagtctcaccgtaccgtgtaacggaccggcgctgagcctgccgttatatccgtgcgataacgtcgatttccaggtcaccacctactacagcaacatttgcccaaatggtgcttatcagggttatggcgcaccgaaaggtaacttcgctatcaccatggcattagcggaactggctgaacagttacagatcgaccaactggaaattatcgaacgtaaccgggtacacgaagggcaagagctgaaaattctcggtgcaatcggtgaaggtaaagcgccgacctccgttccttccgccgccagctgtgcactggaagagatcctgcgtcagggtcgcgagatgatccaatggagcagtccgaaaccgcaaaatggtgactggcacatcggtcgcggcgtcgccattatcatgcagaaaagcggtatcccggatatcgatcaggctaactgcatgatcaaactggaaagcgacggcacctttatcgttcattctggcggtgcggatattggtactggtctggatactgtagtgacgaaactggcagcagaagtgctgcactgcccaccgcaggacgtgcatgttatctccggtgataccgatcatgcgttgtttgataaaggcgcatatgccagctccggtacttgcttcagcggtaacgcggcgcgtttggcagcggaaaatctacgggagaaaattctgttccacggcgcgcaaatgttgggtgagccagtggcagatgttcaactggcaacgccgggcgtcgtgcgcggcaagaaaggcgaagttagtttcggggatattgcccataaaggcgaaaccggcaccggctttggtagtctggtgggaactggcagttatatcacgcctgatttcgccttcccgtatggcgcaaacttcgctgaagttgccgtcaacacgcgtacgggtgaaatccgcctggataaattctacgccttgctggactgcggtacaccggtcaatccagagttagcgttgggacaaatctacggtgccaccctgcgtgctatcggccacagtatgagcgaagagatcatttatgacgccgaaggtcacccgttaacgcgtgatttacgcagttacggcgcaccgaaaattggtgacattccgcgtgatttccgcgctgtgctggtgccgagcgacgataaagtcggcccgttcggggcgaaaagcatcagcgaaatcggtgtaaatggcgcagctccggcgattgctaccgcaattcacgatgcatgcggcatctggttacgcgaatggcatttcacaccggagaaaatactcactgcgctggaaaaaatataaataataaatggccgcttcggcggcctgtttctctgtttgaacgatgactaaatagtgactgcgaaaatgagataagccgttctcaaggcgtcctgcgccccaaattcgtgggaatttattttactaattcagatgatcaaatttactttaaaaggagtgaagggatgtctgatataaaccatgcaggttctgaccttatatttgaactggaggatcgccctccctttcatcaggctctcgttggtgccattacccatctgttggcaattttcgttccgatggtaacccccgcgttaatcgtgggtgcggccttacagctttccgctgaaacaactgcctatcttgtttctatggcgatgatcgcctctggtattggtacctggttacaagtaaaccgctacggcatcgtcggttctggcctactcagtattcagagtgtcaattttagttttgttacggtcatgattgcgctgggcagcagcatgaaaagcgacggttttcacgaagagttaatcatgagcagccttctcggcgtctccttcgttggcgcatttctggttgtcggatctagttttatcttgccctatttacgtcgggttattacgcctaccgtcagcggtattgtggtactgatgatcggcttaagcctgattaaagtcggcattatcgattttggtggaggatttgcagccaaaagcagcggtacgttcggcaattacgaacatctcggcgttggtttattggttttaattgtggtgatcggctttaactgctgtcgcagtccgttgctacgcatgggagggatcgccattgggctatgtgtcggctatatcgcaagcttatgcctgggcatggtggatttcagcagtatgcgcaatttgccgttaatcaccatcccgcatccgttcaaatacggctttagttttagcttccatcagttcctggtggttggcacgatttatctgcttagcgtgctggaagcagtcggcgatatcaccgccacggcaatggtttcccgccgccccattcagggggaagagtatcagtcccggctgaaaggcggcgtgctggcagatggtctggtttctgttatcgcctccgctgtcggtagtttaccattaaccacgtttgcgcaaaataatggggttattcagatgactggcgtcgctagtcgttatgtcgggcgaaccatcgcggtaatgctggttatcctcggcttatttccgatgattggcggcttcttcacgaccattcccagcgcagttctgggaggcgcaatgacgttgatgttttccatgattgccatcgcagggattcgcatcatcatcaccaacggtttaaagcgccgtgaaacacttattgtcgccacttctttaggtttagggcttggcgtctcctacgatcccgaaatttttaaaatattgccagcctctatttatgtattagttgaaaaccctatttgtgctggcgggttaactgcgattttattaaatattatcctccctggtggctaccgacaggaaaacgttctgcctggtattaccagtgcggaagagatggattaacagtaaaggagtcaatgatgagtggagaacacacgttaaaagcggtacgaggcagttttattgatgtcacccgtacgatcgataacccggaagagattgcctctgcgctgcggtttattgaggatggtttattactcattaaacagggaaaagtggaatggtttggcgaatgggaaaacggaaagcatcaaattcctgacaccattcgcgtgcgcgactatcgcggcaaactgatagtaccgggctttgtcgatacacatatccattatccgcaaagtgaaatggtgggggcctatggtgagcaattgctggagtggttgaataaacacaccttccctactgaacgtcgttatgaggatttagagtacgcccgcgaaatgagcgcgttcttcatcaagcagcttttacgtaacggaaccaccacggcgctggtgtttggcactgttcatccgcaatctgttgatgcgctgtttgaagccgccagtcatatcaatatgcgtatgattgccggtaaggtgatgatggaccgcaacgcaccggattatctgctcgacactgccgaaagcagctatcaccaaagcaaagaactgatcgaacgctggcacaaaaatggtcgtctgctatatgcgattacgccacgcttcgccccgaccagttctcctgaacagatggcgatggcgcaacgcctgaaagaagaatatccggatacgtgggtacatacccatctctgtgaaaacaaagatgaaattgcctgggtgaaaagcctttatcctgaccatgatggttatctggatgtttaccatcagtacggcctgaccggtaaaaactgtgtctttgctcactgcgtccatctcgaagaaaaagagtgggatcgtctcagcgaaaccaaatccagcattgctttctgtccgacctccaacctttacctcggcagcggcttattcaacttgaaaaaagcatggcagaagaaagttaaagtgggcatgggaacggatatcggtgccggaaccactttcaacatgctgcaaacgctgaacgaagcctacaaagtattgcaattacaaggctatcgcctcagcgcatatgaagcgttttacctggccacgctcggcggagcgaaatctctgggccttgacgatttgattggcaactttttacctggcaaagaggctgatttcgtggtgatggaacccaccgccactccgctacagcagctgcgctatgacaactctgtttctttagtcgacaaattgttcgtgatgatgacgttgggcgatgaccgtagcatctaccgcacctacgttgatggtcgtctggtgtacgaacgcaactaataataaaactttaacatcctcgtgaggacatcattatgtctggagacatcctacaaacaccggacgcaccaaagccacagggcgcgctggataattattttaaaattaccgctcgtggcagtaccgttcgtcaggaagtactggctggcttaacgacctttctggccatggtttattccgttatcgtcgttccgggaatgctgggcaaagcaggttttcctcccgcagctgtgtttgttgccacctgtctggtcgcgggcttcggcagcttgctgatgggattatgggctaatttgccaatggcgattggttgcgcgatttccttgacggcgtttaccgcattcagtctggtactcgggcaacaaattagcgttcctgtcgcactgggcgcggtatttctgatgggcgtcatcttcaccgccatttccgtaaccggtgtgcgtacctggatcttacgtaatttgccgatgggtatcgctcacggtacaggtatcggtatcgggctgtttctgctgctgattgctgctaacggtgtgggtatggttatcaaaaacccgattgaaggcttgccagtggcgctcggtgcgtttacctccttcccggtgatgatgagcttgctggggctggcggtcatcttcggcctggagaagtgtcgcgtacccggcgggatcttgttggtgattattgcaattagcatcatcggcttaatctttgacccagcggtgaaataccacggtctggtggcgatgccaagcctgactggcgaagatggtaagtctctgattttcagcctcgatattatgggtgcactccagccaactgtacttccgagtgtactggcattggtgatgaccgcagtgttcgacgctactggcaccatccgtgccgtcgccggtcaggcgaatttgttggataaagacaaccagatcatcaacggcggcaaagccctgaccagtgacagtgtaagtagtatattctccggcctggtgggcgcagcgcccgcagcggtttatatcgaaagtgcggcaggaaccgccgccgggggtaaaacaggtttaaccgcaaccgtagtgggggcgttattcctgttaattctgtttttaagtccgctgagttttttgatccctggttacgccactgcacccgctctgatgtacgtaggtttgctgatgttaagtaacgtcagcaagctggatttcaatgattttattgacgctatggctggcctggtgtgtgccgtgttcatcgttctgacttgtaatatcgttaccggtattatgctgggctttgtgacactggtcgtaggccgcgtctttgcacgcgaatggcaaaagctgaatattggtacggtgatcattactgccgcactggtcgcattttacgcgggtggttgggcaatctaatagattctccgcgcctttcagcgcggagatttctttcagagaggattctcaccgctggcaacaatacgctgctggcggactcgcctgagttctctttcagtaagcaactgcagcgcctgtgttgggcaagattcaacgcaggctggcccctcttcccgctgttcacagagatcgcatttcacaatttgttgtcgggtatcccccggcaagctctgaatggtgatcattccaaacgggcacgcactgacgcaactctgacagccaatacaacgggcagaattggtctgcaccacctgctcgcccatcgtcagcgcccccacggggcaagcgccaacacaaggggcgttttcacactgatggcacatcaccggcgcactgatgctgtccagtcgctgtaccttcagccggggtaaaaagacatcggcattcaactcctgttcactagggtgagcgaccacacaggctacttcacaagtacggcagccaatacagtcagccggattaacgataattaagcttttcatcagcttgccttcgtatcaaacagagttaacatatcgcgcgccgcctgccttcctgcggccattgcagtgacaaccagatccgcgccatgaactgcatcaccaccagcaaagacttttttcagatgcgtctgggtaggtaaatacccgacgtcaccggtttgaatcaggccccatttatcgagtttaattccgctgccctgcaaccacggcatggcatgcgcctggaaaccaaaggccataatcagaacatcggcgggcaattcaaactcactacccgctaccggacgaggacgacggcgaccatccggccccggctcacccatggcggtacgaatcaggcccaccgcagttaaacgcccatcttcgtcacaagcgatatattgcggttgaacattgaactgaaactcgacaccttcctcgcgcgcattaaccacctctttgcggctgcccggcatactgacttcatcacgacgatacgcgcaggtcacgctggcggcattgaggcggatggaagtccgcaaacaatccattgtcgtatcgccaccgcccaataccacgactcgcttaccttccacgtccgtcagcggatactcttcagactccggcaatcccatgagctggcgggtatgggcagtcaggaacggtagagcctgaatgacaccgggcgcatcttcatgcggcagatctgctcgcatcatcccgtaagtccccacgccgatgaaaactgcatcatattcagaagttaaatcgctaaaggtaatatcgcggccaatttcacagttaagatgaaagtcgattcccattgcggtgaatatctctcgccgctggcttaataccgttttatcgagtttgaaaggaggaatgccaaaagtcagcataccgccaatttctggatggcgatcaaagacatcgacctgaactcctgcgcgcgccagaatatcagcacaccctaaccctgcaggcccagcgccaatcaccgccactttttcgctacggggaacaactttgctgacatcgggacgccaacccatcgccagcgcggtatcggtgatgtagcgttccagattaccgatagagactgcgccgctgtgatctttcaaagtacatgcgccttcacaaagacggtcctgtggacataccctgccgcaaatttctggtaaggaactggtctggtggcaaagttctgccgcttcaataatctttccttcctgtaccagacggatgtaatccggaatagcgttatgcagcgggcaatgccagttgcagttagctttttcggcacaataaacacagcggtcactctcataagtcgcttgttgtggatccagcccgcaatatatttcgccaaagtgggttttccgttcactcgcactaattttatctgcgcctttacggctgttaacggggagcaacgctgcactgcgagatggctgagcgtcactactcgcttttcctgctgccgttttgcgctggcgggccacctttatctgctgcaaccctttatcgtccatcagtcgtaacgcctgtgttgggcaaacttcaatacaggcttgcgtgccggaactgcgctggttacaaaggtcgcatttctgcgcaatcgtatcgaccatctcaacgacgccaaaggggcaagcgattgcgcatcttttacaaccaatacatttttgctcgtccagttgtacgctatcggactggaaagtcagagcattaaccggacaagccgtaacgcaaggggcattgttgcagtgatggcaggccaccggattcgcagcctggcctttccctacaacgtggatacgcggtcgaaagtcactgtgactcagcggccagttttcttgattgtgtgccaccgcacaggcaatttcacaagcatgacagcctatacattccgcagcttcagcagcaataaacttattcatttgcatccctttcatttaatgagttatgtcttctcaaatttcgcgatgcaataaacgggcatatattaggtagcatgaccgttttaattataattttgcgactgagttcaaattattgcccctcaatctatgccgctttcattatttcaacattgccgatcaaaagagcgctatccagataaaaacgattaaatgcgagagtgcgacatgccagaatgattaatgaaatatcaatatgagaaaattacagataattccattgtcaggttctcttctcattttcgtggtttaaccacgattatgtgattgcctccgcaattcctgtctctaactccccttcctcgcaaaaactggcactccacgagcatgtgtttagacagtttcattaacgtaaacggttgctttttactctggcgggcgaaaggagaaacactgatgagcgccatagattcccaacttcccagttcttctgggcaagaccgcccaactgatgaggttgaccgcatattaagtccaggaaagctgatcatactcggtctgcaacacgtccttgtcatgtacgcaggtgcagtcgctgttcctcttatgattggtgaccgactgggcctcagtaaagaagctattgcgatgctcattagcagcgatctcttttgctgcgggatcgtcacattattgcaatgtatcggtatcggccgctttatggggatccgcctgccggtgattatgagcgtgacctttgctgctgtaacaccaatgatagccattgggatgaacccggatatcggcctgctggggatatttggtgccactatcgccgcgggttttatcaccacattattagcgccacttatcggtcgcttgatgcctttattcccgccactggttaccggtgtggttattacttctatcgggcttagcatcattcaggtgggtattgactgggccgccggaggtaaagggaatccgcaatatggtaatcccgtttatttaggtatctcctttgccgtcttaatttttatcttgctcattactcgctatgcgaaaggatttatgtccaacgtcgccgtattactggggattgtatttggctttttacttagctggatgatgaatgaagtcaatttatccgggctacatgatgctagttggtttgcgattgttacgccgatgagctttggtatgccgattttcgatcccgtttccattctgaccatgactgccgtgttaatcatcgtgtttatcgagagtatggggatgttcctggcactgggtgaaatagtcggtcgtaaactctctagccacgatattattcgcgggctgcgtgtcgatggcgtagggacaatgataggcggcacgtttaacagcttcccccacacgagtttttctcaaaacgttggcctggttagcgtgacgcgcgttcatagccgctgggtgtgtatttctagcggaattatattaatcctgtttggcatggtgccaaaaatggcggtgctggtagcctccattccgcaatttgtgctgggcggcgctggtctagtgatgttcggcatggtactggcgacagggattcgaattctgagccgctgtaactacaccaccaaccgttacaacctctatattgtggcgatcagtctcggcgttggcatgactccgacgctctctcacgatttcttttctaagttaccggccgtactgcaaccgctgctacatagcggcattatgctcgcaacccttagcgccgttgtgctgaacgtcttctttaatggctatcagcatcatgctgacctggtgaaggaatccgtctctgataaagatttaaaagtcaggacagtacgtatgtggcttctgatgcgcaagctgaagaaaaatgagcatggagaataatatgaattttttaatgcgcgctatattcagtctgttgttgctttttactctctctattcctgtcatttctgactgtgttgcaatggccattgaaagtcgcttcaaatatatgatgctacttttttaaatggtttttacctgtcggcatccgctcaaaacgggcggttgtcgataaacgctcacttggttaatcatttcactcttcaattatctataatgatgagtgatcagaattacatgtgagaaattatgcaaacggaacacgtcattttattgaatgcacagggagttcccacgggtacgctggaaaagtatgccgcacacacggcagacacccgcttacatctcgcgttctccagttggctgtttaatgccaaaggacaattattagttacccgccgcgcactgagcaaaaaagcatggcctggcgtgtggactaacagcgtttgtgggcacccacaactgggagaaagcaacgaagacgcagtgatccgccgttgccgttatgagcttggcgtggaaattacgcctcctgaatctatctatcctgactttcgctaccgcgccaccgatccgagtggcattgtggaaaatgaagtgtgtccggtatttgccgcacgcaccactagtgcgttacagatcaatgatgatgaagtgatggattatcaatggtgtgatttagcagatgtattacacggtattgatgccacgccgtgggcgttcagtccgtggatggtgatgcaggcgacaaatcgcgaagccagaaaacgattatctgcatttacccagcttaaataaaaaaaccccgacatttgccggggttgtgagcataacgtaatgcttattttaccggacgcatcgccgggaacagaataacgtcgcggatggtatggctgttggtgaacagcattaccatacggtcgataccaattcccagacctgctgtcggcggtaagccatgttccagtgcggtgacgtaatcttcatcgtagaacatcgcttcgtcgtcacctgcgtctttcgcggcaacctgatccaggaagcgttgcgcctgatcttccgcgtcattcagctcgctaaagccgttaccgatttcacgaccaccaatgaagaactcaaagcggtctgtgatttccgggttaacgtcgttacgacgcgccagcggagaaacttctgccggatattcagtaatgaaggtcggctgaatcagatgtgcttctgccacttcttcgaagatctcggtaacgatacggcccagaccccagctcttctcaacgtggatgccgatagattcagcaattgctttcgcagagtcgaagttgtccagatccgccatgtcggtttccgggcgatatttcttgatcgcttcacgcatggtcagtttttcgaacggtttaccgaagtccagcgtcacgtcgccgtaggtcacttccgtcttaccgagaatatcctgtgccagagtacggaacaggctttcggtcagctcgatcagatctttgtaatctgcgtaagccatgtagagttccatcatggtgaactctgggttatgacgtacggaaataccttcgttacggaagttacggttgatttcgaatacacgctcgaagccaccaaccaccagacgcttgaggtacagttccggcgcgatacgcaggtacatgtcgagatccagcgcgttatggtgggtgataaacggacgcgcagcggcaccgccagggatcacctgcatcatcggcgtttcaacttccataaagccgcggttcaccatgaactggcgaataccagagaggatctggctgcgcactttaaaggtgttgcgggattcatcgttggagatgagatcgagataacgctgacgatagcgcgcttcctgatcctgcaagccgtggaatttatccggcagcggacgcagtgctttggtcagcagacgcaactcggtgcagtggatagacagttcgccggttttggttttgaacagcttacctttcgcgccgaggatgtcgccgaggtcccattttttgaactgctcgttataaacgccttccgggagatcgtcacgggcaacgtacagctgaatgcgaccgccaacgtcctgcagggtaacgaaagacgctttacccataatacgacgggtcatcatgcggccagcaacggcgacttcgatgttcagcgcttccagttcttcgttctctttgccgtcgaattctgcgtgcaattggtcagaggtatgatcgcgacggaaatcgttcgggaaggcaatcccctgctcgcgcaggttcgccagcttctcacgacgcgttttcagttcattgttaagatcgactaccgcgtcagcgccctgtgcgtgttgttcagacatgttggttcctcataaccctgctttcaaacttgcttcgataaattgatccaggctgccgtccagcacggcctgcgtgttgcgggtttctaccccggtgcgcagatctttaatgcgggagtcatcaaggacataagaacgaatctggctgccccagccgatgtcggatttgttatcttccatcgcctgtttctcggcatttttcttctgcatctccagttcataaagcttcgctttcatctgcttcatggcctgatctttgttcttgtgctgggaacggtcgttctggcactgggtcacgatcccggtcgggatgtgggtaatacgcaccgcagattcggtacggttaacgtgctgaccgcccgcgccggacgtgcgataaacgtcaatgcgcagatccgccgggttgatttcgatatcaatatcatcatcaacttccggataaacaaacgcggagctgaagctcgtgtggcgacgaccgccggagtcaaacgggcttttacgcaccaggcggtgaacgccggtttctgtacgcagccagccgtaagcgtaatcgccggagattttgatcgtcacggatttaatacccgccacttcaccttcgctctcttcgatgatttcagttttgaaaccacggctttctgcccagcgcagatacatacgctcaagcatgctcgcccagtcctgtgcttccgtaccgccagaccccgcctgaatatcgaggtagcagtcggcgctgtcatattcgccagagaacatacggcggaactcaagctgcgccagtttttcttccagggcgtcgagttcagcaacggcttcgttaaaggtttcttcgtcgtcagcttctacagccagttccagcagaccagaaacatcttccagcccctgtttcatttggtcgagggtgtcgacaacggcttcgagggaggaacgctctttacccagcgcctgtgcgcgttcgggttcgttccagacatccggctgttccagctcggcgtttacttcttccagacgctctttcttggcgtcgtagtcaaagataccccctaagaacgtcggagcgttccgtgaggtcctgaatgcgattatttaccggattaatttcaaacatggtctgatttcttttattgagctagtcaaaatgcggtgataagagcgggattgtacccaatccacgctcttttttatagagaagatgacgttaaattggccagatattgtcgatgataatttgcaggctgcggttgccgcgaaactcgttgatatcgagcttataagccagttgcacttcgcgcacgccgttatccggccagagggcggtatcgacattaaaagcaataccatccagcagtggaccgccgccgaccggttcgaccatcaccttcaaatgacgttcgcccaccagccgctgttgcagcagacggaaatgaccgtcaaacagcggctccgggaacatctgcccccacgggccagcatcgcgcagcagctgcgccacttccatggtcatttcggccgggcttaacggaccgtcacttaccacttcgccttgcaataggctagggtccagccactcagtaaccagttcgccaaaccgttgttgaaagagtttgaatttatcctcttccaggctcaaacccgccgccatcgcatgaccgccaaacttcagcatcatgccagggtagagtgtgtctaatcgctccagcgcatcacgcatatgcagcccctgaatggagcgaccggaacctttcagcgtaccgtcacctgctggcgcaaacgcgataaccggacggtgaaaacgctctttgatgcggctagccagaataccgacaacgccctgatgccattcggggtgatacattgccagcccgccgggtagcgtgtcacggctgcgctccagtttctcgcacagggtcagggcttcaatttgcattccttgttcgatctcttttcgcgtctggtttagcgcatcgagttcatttgccagcacgcgcgcttcgccgatgttgtcgcacaacaacagcgccacaccgacggacatatcgtccagtcgtccggcagcattgagacgtggccccagcgcaaaacctaaatcgctggcggcgagtttttgtgcatcacggtttgccacttcaagcagcgctttaatccccggacggcactttccggctcggatgcgactcatcccctgccaggtcagaatgcgattattagcgtccagcggcacgacgtccgccactgtccccagcgcgaccagatccagcagttctgccaggttaggaattgcgatgttacgctcatcaaaccagccctgatcgcgcaaaaaggtgcgcagcgccagcatcagataaaacgccacacccacgcctgccagacttttgctcgggaaattacagtcgcgcaagttagggttaatgatcgcttccgctgcgggtaatgtgtcgcctggcaaatggtgatcggtaacaataaccgggatgcccaagctgcgagcgtgctcaacccccgcatgggaggaaataccgttatccaccgtgacaattaactgcgcgccacgggcatgggcctgatcgaccacttccgggcttaagccgtaaccgtcttcgaaacggtttggtaccaggtagtcgatattgctgcaaccaaggctgcgcatcgccagcacgcttagagccgtgctggtcgcgccgtcggcgtcgaaatcaccgaccacaataatccgcgttccttcgcgaaaagcgttgtaaaggatctcaacggccttttcgacgccgctcagttgctgccagggcagcatacctttaacactgcgttccagttcttgcgcactgcgtactccccggctggcgtataaacggcgcagcaagggaggcaattcagcgggcaagtctgccgtttcatcgacttcacggcgacgaagttgtatctgttgtttcacgcgaattatttaccgctggtcattttttggtgttcgtcgaggaattctttcatctctttcggcggctggtaacccggaacaagtgtgccattgctcagcacaactgccggagtaccgctaacgccaagctggacgccaagtgcgtaatggtcggcaatatccacgtcgcaactggctggtgcgacgcttttacctgccatcacatcatcaaacgctttgtttttatctttcgcacaccagatagctttcatttctttctctgcatcgctgtccagcccctggcgcgggaaagcaagataacgcacggtgatccccagcgcgttgtagtctgccatttgctcatgcagtttgtggcagtaaccacaggtaatatcagtaaacacggtgatgacgtgtttttcctgcggcgctttataaacgatcatctctttttcaagcgcattcaactgctttaacagcatcttattggtgacattgaccggagccgtgccactaacgtcatacattggcccctgaatgatatgtttaccatcatcggtgatgtacaacacgccgctgttagtcagaactgtcttcatgccagctacaggcgcgggctgaatatcgctgcttttgatgcccattttggctaacgtttgttgaattgccgcgtcatcagcctgagcaaagccactaaacgccgctaacaaagtaaacaacataaaacctttcttcataaatcttcccgttcttttcagacatcacgcccgcgggtgatgctgttgatgaagttgccgcagacgctcggtagcgacatgcgtataaatttgcgtggtggagagatcgctgtggcccagtagcatctgcaccacgcgtaaatccgcaccatgatttaataaatgagtggcaaaagcgtgacgcaacacatgcggactcagcttttcgctgtcgatacccgccagcacagcataatgtttaatacggtgccagaaggtctgtcgcgtcatctgctgcgcacgctggctgggaaacaacacgtcaatactcacaccattcagcagccacggacgcccatgttccagataggtttccagccagtaaaccgcctcttcacctaacggcaccagacgctctttgttgcctttaccaatgacccgtaccacgccctgacgcaggctgatatcactcattgtcagtccgaccagttcagagacacgcagcccggtagcatacaacacttcaagcatggctttatcgcgtagctccagtggctgatcgattaatggtgcctgtaataaacgttcgacctgcgcttcgcttaaatcttttggcaaacgctggggcaatttcggactagcgagatgcgcactgggatcgtcttcacgaaacttttcgcgataaagatactggaacaatcggcgcactgcactcagcaaacgcgcactgctggtggctttatacccgccctccagccgttctgccagtaatgcctgcaaatcgtcactttgcgccgtcgccagcgtcaacccgcggtgatgcaaccactccaccatcatactcagatcgcgacggtaagcgttcaacgtattttcagccagatttttttccagccacagagcatcaagaaactgctcgatgcgtgccagatcctgtttcacttgcgccccttatggtcactcatttgatccattatgccttattgtgccgtgactaaagcgattctgatacactagccgcaaaagccacagcagaatcgagaagcttacgttatgaatatgggtcttttttacggttccagcacctgttacaccgaaatggcggcagaaaaaatccgcgatattatcggcccagaactggtgaccttacataacctcaaggacgactccccgaaattaatggagcagtacgatgtgctcattctgggtatcccgacctgggattttggtgaaatccaggaagactgggaagccgtctgggatcagctcgacgacctgaaccttgaaggtaaaattgttgcgctgtatgggcttggcgatcaactgggatacggcgagtggttcctcgatgcgctcggtatgctgcatgacaaactcagcaccaaaggcgtgaagttcgtcggctactggccaacggaaggatatgaatttaccagcccgaaaccggtgattgctgacgggcaactgttcgtgggtctggcgctggatgaaactaaccagtatgaccttagcgacgagcgtattcagagctggtgcgagcaaatcctcaacgaaatggcagagcattacgcctgatctcactgacggcttagcgcatatgctttgccgtcatctttatctttgcgtctcttgttgcaacaaaatccgccgtaaatcccgccattcagcttcgtccatgctgtcggctgccagccataaatgttgccgtttaccgccatcagaacgtaaacgcagcatcatgccgctcttaatcatccacggtgctttgacgatgctccactcctgcccttgccaacgcaaacgcccgtccatcaacaagcgaatttccccctggcgagcattaatacgccgctggctgcgaacgcaatcaaacaccaccaggctaagtaacaccatccataacggggtgtaactgagtggccagggcatgagtaaaataacagcggcaaccagcccatgaatcagcaaggaaagccactgtgcgcgccaggagacgcgcaaatcagattgccacaggaccacgttcccggttccgtgtctggatgagtcggaccatcatttccagttctgcatcggccggtttaccgtgattcatcagccagttaaacaggtccggatcgtcacattccagcagacgaataaagatgcgtttttcgtcatcgcttaagctgtcgtactcatgttcgaaaaacggcatgatactaatatcgagttcgcgcataccacggcggcatgcccaatgaatgcgggctttgttgttaatgtccatcttcttcctgtctcacgaaaatccagtacccggctattgtaacgtgtttttcgccttcttttacgggaatatcagtaaacaccatcgcgatcgcgaaattaattcacaacaattcaatggcttcatttttttggaagtcgcctcgcagaaggcacagatcgcgtagtgaaagcacttgcattgcctcatagctcttttaccattagtcattaatacgccgttaagcaactcaggactctattatggcttttacaccttttcctccccgtcagcctacggcttctgcccgtttaccgctgacgctgatgacgcttgatgactgggcgcttgccaccattactggcgcggacagcgaaaaatatatgcagggtcaggtgacagcagatgtcagccagatggcagaagatcagcacctgctcgccgcccattgcgacgccaaaggtaaaatgtggagcaatttacgtctgttccgcgacggcgatggctttgcatggattgaacggcgcagcgtgcgtgaaccgcagctgactgaactgaaaaaatatgcggtattctctaaagtgaccatcgcgccagacgacgagcgtgtgctgcttggtgttgccggttttcaggcgcgcgccgcgctggcaaatctctttagcgaactgcctagcaaagaaaaacaggtagtcaaagaaggcgcgaccactttgctatggtttgaacacccggcagaacgtttcctgatcgtaaccgatgaagctactgctaatatgctgaccgataaactgcgcggtgaagcggaactgaacaatagccaacagtggctggcattaaacattgaagcgggtttcccggtgattgatgccgccaacagcgggcagtttatcccacaggcgaccaatctccaggcgctgggcggtatcagctttaagaaaggctgttataccggacaagagatggtggcgcgagcaaaattccgtggtgccaataaacgtgcgctctggttgctggcaggtagcgccagccgactgccggaagctggtgaagacttagagctgaaaatgggcgagaactggcgtcgtaccggtacggtactggctgcggtaaaactggaagatggtcaggtcgtggtacaggtcgtcatgaataacgatatggaaccggatagcatcttccgcgtacgcgacgatgcgaatacattgcatatcgagccgctgccgtatagcctcgaagagtaaatctctttatcgcatcaggcatttatcgcctgatgcgacgctggcgcgtcttatcatgtctgggatttgatgcctttatcacaacagggacgaggcccgtagatcggataaggcgttcacgccgaatccggcagttgtgctccgatgcctgatgcgacgctggcgcgtcttatcaggcctacaaaggcatacccattacgcctgcccaatatacaaatagatcgccagaaagtggcacacactaccgccgagcacgaagccgtgccagatggcatggttgtatggaatgcgtttgcagacgtagaaaatcaccccgaggctataaaccacgccgcctaccgccagtaaggtaacgctgcccgccgcgagcttaactgccatttcataaattaccaccaggctcagccagcccatcgccagataggtcaccagagataaaattttgaatcggtgcgcgatggtcagtttaaacagaatacccagcaatgccaggctccagataacaatcatcaacccgcgcgctaacggagaatccagccccaccagcaaaaacggcgtgtaggttccggcaatcaacaggtaaatagcgcaatggtcaaatttcttcagccacatttttgcccgttgatgaggaatggcgtgatagagcgtgctagcgaggaacagcaggatcatactgccgccatagaggctgtagctggttatcgctgtggcgctggcattaagatccaccgcctgaaccagtagcaacaccagcccaacgataccaaacaccaacccaatgccgtgactgacgctgttggctatttcctctgccagactatatccctgcttaatgaggggcttctgaaccataacttactccggagaaacgtacacgcacatgtatacctctccagcgtaactgagaatagttccagtgaacacctgttagctaaaataaattctgatttgagactaatctcctaaaaatcatgaaattaaatgcgaaatttcaactaacaggcgtgagttcaatttaaagacatttaaattcaatcacataaaattgtgtctgaccgggatagatgtcagcaatgacttttttcagttcagtcagggtcatattttcctgctctgcatgtttttcagtcagcgtatccagcgttacggtactggttgcggtgacttcaatcgtgcaaaaataaccgtcatcttcaaaacgtccgacacgaagcacatcacccgttttgaagtggctttcagactcgtcgcggatggtgatggttttacgcccagccagaatgtcatcctggaaacgttgaaaaaaagtgatgtcgtttggctgcatggtactatttcctgtaagaattgactcatctggagcctatgatagtgaaaaaactcaccttaccgaaagatttcttatggggcggcgcagttgccgctcatcaggtcgaaggcggctggaacaaaggcggaaaagggccgagcatttgtgacgttctgaccggtggcgcacacggcgtgccgcgcgaaatcaccaaagaagtcttgccaggaaaatactatccaaaccatgaagccgttgatttttatggtcactataaggaagacatcaagctatttgccgaaatgggcttcaaatgttttcgtacatccattgcctggacgcgcatttttccaaaaggcgatgaagctcagccaaacgaagaagggctgaagttctacgatgatatgttcgatgaactgctgaaatacaacatcgaaccggtgatcaccctctcccactttgaaatgccgctgcatctggtgcagcaatacggtagctggaccaaccgtaaagtggttgatttctttgtacgtttcgcggaagtggtatttgaacgctataagcacaaagtcaaatactggatgaccttcaacgaaattaacaaccagcgtaactggcgtgcaccgctgttcggttactgctgctccggcgtggtgtataccgagcatgaaaacccggaagagacgatgtatcaggtgctgcatcaccagtttgtcgccagcgccctggcggtgaaagctgcgcgtcgcattaacccggagatgaaagtcggctgtatgctggcgatggtgccgctctatccttactcctgtaacccggacgatgtgatgttcgctcaggagagcatgcgcgaacgctacgtctttaccgatgtgcagctacgcggctattacccgtcctatgtgttgaacgagtgggagcgtcgcggatttaacatcaaaatggaagacggcgatctggatgtgctgcgtgaaggcacctgcgattatcttggtttcagctattacatgaccaatgcagtgaaggccgaaggcggcaccggcgatgcgatctctggttttgaaggcagcgtaccaaacccgtatgttaaagcatctgactggggctggcagattgatccagtaggtctgcgctatgcactttgcgaactgtatgagcgttatcagaggccgctgtttattgtcgaaaacggttttggcgcttacgacaaagtggaagaagatggcagcatcaacgacgactaccgcattgactacctgcgcgcccatatcgaagagatgaaaaaagcggtgacttacgatggcgtggatctgatgggctacacaccgtggggctgcatcgactgcgtgagcttcaccaccgggcagtacagcaaacgctacggctttatctatgtgaataaacatgacgacggtactggcgatatgagccgtagtcgtaagaagagctttaactggtacaaagaggtgattgccagcaacggcgagaagctttaagtcgatgaagtaccggatgcaatacttgttgcatccggtcagacaacttccctgttttatttcccgcccgccaaatcgataaaacttcccgtgacgtaagaggctttatcacttagtagccagacaatggcctgcgcgacctcttctgcctgtccaccacgctgcatggggatgttgctcttaacgcgatcgacgcgtccaggctcgccgccgctggcgtgcatttcggtataaataaaccctggccgcacgcagttaacgcggatcccctgcgcggcgacttccaggcttagtccggtggttaacgtatcaatcgcccctttgcttgccgcgtaatcaacatattcccctgggctacccaaccgactggccacgctagagacattgacgatagcgccgccactgccaccatttttaagcgccatgcgttttaccgcctcgcggcagcagagaaaatatcccgtcacgttggtggaaagtactcggttgattcgctctgcggtaaggttttcaacggtgcactgggtaaacaagatcccggcgttattgaccagcgctgctagcggttcatcgtgctgatcgattgctgtaaacatcgcaacgacctggttttcgtcgctgatatccgcctggagcacgaatgctttgccaccggcttgcgttattaagttcatcacttcctgcgccgcgtggaggttttgctgataattaaccgccaccgtatacccttcttgcgccaacagtaatgcagttgcccgcccgatgccgcgactgccaccagtcacaagtgctatagccatttgtttttccgagaaaaattaattcgttgacgtatctttgagattgctaacaaactggctcaatcttcaatgttggcacgcttttccccctcgccctttcagggagagggccggggtgagggtaaatattcgcgccagtgccggcctgttcccctcaccctaaccctctccccaaaggggcgaggggactgtctgagcacttttgtactttgtcatctgactaaaaaggcgccgaagcgcctttagaaaatagtcgaatcagtgaattactggtattcgctaatcggtacgcaggagcagaacaggttacggtcgccgtaaacatcatccagacgtttcactgtcggccagtatttgtctgccacacctgccgggaataccgcaacttcacggctgtacggatgcgcccactcggcgaccagttcgctctgaatgtgcggcgcgttcaccagcgggttatcttccagcggccagacaccggctttcacctggtcaatttctgcgcggatagccagcatcgcgtcgataaagcgatccagttccactttgctttcagattcagtcggttcaaccatcagcgtacccgccaccgggaagctcatcgtcggcgcgtggaaaccgtagtcgatcaggcgcttggcaatatccagctcgctgatgccggtttcttctttcagcgggcgaatatcgagaatacattcgtgcgccacgcgaccgtcgcgaccggtatacagcaccgggaaggcatcctgcaggcggctggcaatatagttggcgttgaggattgccacctggcttgcttttttcagcccttctgcgcccatcatgcggatgtacatccagctgattggcaggatagaggcgctaccgaacggtgccgcagaaaccgcgccctgacgggttaacatgccttcgatttgcaccacgctatgacccggtacaaacggtgccaaatgcgctttcacgccgatcggtcccatacccggaccaccaccgccgtgcggaatgcagaaagttttatgtaggttaaggtgactaacgtccgcaccaataaagcccgggctggtgatgccaacctgggcgttcatgttcgcgccatcaaggtaaacctgaccgccgaactgatgcacgacttcacacacttcacggatcgtttcttcatacacgccgtgggtagaaggataagtcaccatgatacaggagaggttatcgcccgcctgttccgctttcgcgcgcagatcagtcagatcgatgttgccgtttttatcacacgccacaaccaccacctgcattcctgccatatgtgcagaagcggggttagttccgtgcgcagaagccgggatcaggcagatatcgcgatgcccttcgttgcggctttcatgataatgacgaatcgccagcaggcccgcgtattcgccctgtgcgccagagttcggctgcatacaaacggcgtcgtaaccggtcagtttcaccagccagtcagccagctgcgcaatcatctgctgataaccttcggcctgctccggcgggcagaacgggtgcagttcggcaaattccggccaggtgattgggatcatctcggcggcggcgttcagtttcatggtgcaggaacccagcgggatcatcgcctgattcagcgccagatctttacgctccaggctgtgcatatagcgcatcatttcggtttcgctgtggtagcgattaaacaccggatgggtgaggatttcgtcgtcgcgcagcatcgcaggctggatagagcggctgtcgtgagccacgtctttgtccagcgtgtcgatgtccaggccgtggttatcgcccagcagcacgttgaaaagctgcattacgttttcacgcgtggttgtttcatcaagggtgatcccaaccgcgttcagaatatcgctacgcaggttgatttcagccgcttcggcacgcgtcagtacgcccgctttgtcggccacttccacacacaaggtgtcgaaatagtgcgcatggcgcagtttcagacctttttgttgcaggcccgccgccaggatatcggtcagacggtgaatgcggttagcgatacgtttcaggccaaccgggccgtgataaacggcatacaggctggcgatgtttgccagcagtacctgggaagtacaaatgttggagttcgctttctcacggcggatatgttgctcgcgagtctgcatcgccatgcgcagcgcggtattgccagctgcatctttgcttacaccgataatacggcccggcatactgcgtttgtattcatctttcgccgcaaagaatgccgcgtgtgggccaccgtagcccatcggcacgccgaagcgttgcgcgctaccaaaaacaatatccgcgccctgtttacccggcgcagttaacagcaccagcgccataatatcggcggcaacgctgaccacaattttgcgacttttcagttcgctaataagcgcagtgtagtcgtgaatttcaccggtagtgcctacctgctgtaacagcacgccgaagacgtcctgatggtcgagcactttttgcgcgtcatcgacaatcacttcaaaaccaaaggtttcggcacgagtacggaccacatccagcgtttgcggatgcacatcggaagccacgaagaagcggttggcatttttcagtttgctgacgcgtttcgccatcgccattgcttcggcggcagcggtggcctcgtccagaagagaagcagaggccatatccagtccagtcaaatccagcgttacctgctggaagttgagcagtgcttcaaggcggccctgggagacttcaggttgatacggagtgtacgcggtataccagcccggattttccagcatgttacgcaggataaccggcggtagctgcacggcggtgtaacccatgccgatgtaagacgtgaagcgtttattgcgactggcaatagccttgagttctgccagtgcggcgtattcggtcgccggtgcgccaacctgcggtggtgtcgcaagttgaatatctttcggcacaatctggccggtcagcgcgtttaagctttgtgcaccaacggcattcagcatttcttgctgttgcgcggcgtccggtccgatatggcgttcaataaaagcgccgctgttttcaagctggcttaacgtctgtgtcatgagcgatggttcctgaaacgtgcagtgaattgtgaacctctctccttacgaagagagtgagggtgaggcataaattttcctcaccctgatcctctcccgcagaagaggaataaagccgttactcgtcttctaacaatgcttcgtatgcggtcgcatccagcagactttccagttcgctttcatcgctggctttgattttaaagatccagccgcctgcatacggttcgctgttcaccagttccggggaatcgctcagtgcgtcgtttaccgccacgatttcaccgcttactggcgcataaatgtcactcgccgcttttacgctttcggcaaccgcgcagtcatcgcccgcgctaaccgttgcgcccacttccggcaggtcaacaaacaccatatcgcctaacagctcctgagcatgttcggtaataccaacggtgtaagtgccgtcggcttctttacgcagccattcgtgttctttgctgtatttcagttctgctggtacgttgctcatcaatcaatctccaaaaaagtaaatcacgcgacggctttgccgttacgcacaaaaacaggttttgtcactttaaccggcatttcacggttgcgaatttgcacaatcgccgtttcgccaataccttccggcacgcgcgccagcgcaatgctgtaacccagcgtcggggagaaagtaccgctggtgataatgccttcatgctggttgccctgcgcatcggtaaagcgtaccggcagttcattacgcagcacgcctttttcggtcatcaccagaccaaccagtttttctgtaccatgctcacgctgcacttccagggcttcacgaccgataaagtcacgatctgccggttcccaggcgatggtccagcccatgttggcggctaaaggagagatggtttcgtccatctcctgaccataaagattcatgcccgcttccagacgcagcgtgtcacgcgcgcccaagccacatggcttaacacccgcttccaccagcgcacgccagaaatcggccgctttttcattgggcagcgcaatttcatagcccgcttcaccggtataaccagtggtggcaataaacagatcgcccgcctgcacgccaaagaacggtttcatcccttccaccgcctgacgctgggcgtcattaaacagtgtggcagcttttgcctgcgcattcggcccttgcacggcaatcatggaaaggtcatcacgaacggtaatttcgatgccgaaaggttcagcgtgttgggtaatccaggagaggtctttttcgcgggtggcggagttaacaacgaggcggaagaaatcttcagtaaagtagtagacgatgaggtcatctatcacaccgccagaggcattcaacatcccgctgtaaagggctttgccgcttttggtgagcttcgccacatcgttcgccagcagataacgcagaaactcccgggtgcggctgccgcgaagatcgacgatggtcatatgactcacatcaaacattccggcatcggtacgtaccgcatgatgttcgtcgatttggctaccgtaatgcagcggcatcatccagccgtggaaatccaccatgcgagcgccgcaaagcgtgtgttgttcgtacaaaggagtctgttgtgccatcttgtcctcattgaataagcggggctgacaactttttcatggtgaaattatcaccacgaaacccagcatcggagccactcccggtccccaacgcaatcgttctcttttgcctgaacttaccaccgaaacagactgttaaccataaggtaaaattgatcatcacattagcttatggttaaaaaatgcaaaaatcgcgacagaataaaaaaccaaaaaatacaccagtttctatacaaagatgatgtgatgagaaagtcaatttgaataagacaatattaagagctaaaaaaatgtcaaaaaacactaaatcaaaaaataatggcattagaaaatataatgcgaaaacggaggtgaaattagtttatttcaaatgaggaaaatctcccggcgaaaaaaccgggagatgaaagtgtgatgggtatcaaataaacaacagaggagaaatttttaacgcagccattcaggcaaatcgtttaatcccattgcctggcggataagttgcggcttaacgccaggaagcgtgtcggccagtttcaaaccaatatcacgcagcagttttttcgccggattggtaccggaaaacagatcgcggaatccctgcataccagccagcatcaacgccgcactgtgcttgcggctacgctcatagcgacgcagataaatgtactgcccgatgtctttcccctgacgatgcaaccgtttcagttcggcaatcagctctgcagcatccataaagccgagatttaccccctgccccgccagcgggtgaatggtatgtgcggcgtcgcccaccagcgccagacggtggctggcaaactggcgcgcataacgccccgtcagtgggaacacctgacgcgcgctctcaaccttgcataagcccaggcgattatcaaaagcgatatttaacgcgcgattaaattcgtcttcacttgcctgctgcatccgctgcgcttcctctgggctcagactccagacaatgctgcaaagatgcggatcgctaagcggtaaaaaggccagaatgccttcgccatggaaaacctgccgcgccaccgcatcatgcggttcttccgtgcgaatggtcgctaccagcgcgtgatgctgataatcccagaaagtcagcggaatatcggctttgttgcgcaaccaggaattagcgccgtccgcgccaatcaccagacgcgccgttaacatgctgccatctttcagcgtcaggaaggtttcattttctccccaggcgacctgctgtaattctgcgggggctaacagagtgatatcactgctctgatgcgctttgttccacagcgcgtagtgaatcacactattttcaacgatatgcccaagatggctatagcccatgctttgatcgtcaaagctaatgtgaccaaagctgtctttgtcccacacttccataccgtgataacagctggccctacgagagagaatgtcctgccagacgccaagacgggtgagtaatttttcgctggcggcattgatagcgctaacgcgcagttgtggtggtgcattcgccgccagaggttcctgtacgcgctgctccagtacggcaacgcgtaagccgctcccctgtaagccacaggcaaccgccagccccaccatgccgccgccaacaatggctacatcaacactttgcattgtttattccttaaaaccgccttcaacgcgccacccaaccgagggtgcgctgcgccagcacatcgcgtgccggggtgaataattccatcgtcatcagcccgatgttgcgcccgacaaccagcggtgcccaacggttggcaaaaagatgtacaaggctgtccgtgacgccaatggttgcttcgcgatcgctctgtcgacgctgctgataacggcacaatacgccgtaatcccccatgtcttctccgcgctcctgcgcctgagtcagggtttccgcaagactcatcacatctcgcataccgaggttaaacccttgcccggcaatcgggtgcagagtttgcgccgcattgcccaccagcacggtacgatgggtaatagatctggcggcgtgggttaacgccagcggataagcactgcgtttaccagcgtgggtaattttcccaagtcgccagccaaaggcgctctggagttcacggcaaaacttctcgtcactccagctcaacacctcttcgcgccgttccagtggatgacaccagaccaggctacagcgtccgtcagacatcggcaacatcgccagcgggccatgttgcgtaaagcgttcaaaagcgcgcccttcatgcgcaacggaagtagcaacgttggcaatcacggccagttgttcgtaaggctcctgctgccagtcaacgccgcacgcggtggctaacgcactatgggtgccatcagctgctaccagcacgcggcccgtcagcgtctcgccactctccagcgtcacttcaacgtgactctgagtacgggcaacgttagccacgcgatcagggcaatgcagcgttacgccaggtgctttacgcagcaatgcaaacagccgttgcccgacattgtgcaattcgacaacctgtcccagcgccgccagttggtaatcttctgcggcgagggtgacaaatccagcgtgaccacgatcgctgacatgcacggtggtgatggcagttgcgcaatccgccagagattgccagacgccgatgcgcgccagttgctgacaggtacccgccgccagcgctatcgctcgtccatcaaagcccggatgagcatgactctctggcgcagtcgcttcaatcaaatgtaccggcagcgccccgtgacttaaccgggaaatagccagcgccagcgtcgcgcccgccatgccgccaccgacgatgattacgctcattgctttctcgcagcaaccatcaacgcttcgatttcttccggctttttcaccacgctggcggtgaggttttcgttaccggtttcggtaatcacaatgtcgtcttcaatacgaatgccgataccgcgatattgttctggcacttctgcatccggcgcaatatacagccctggctctacggtcagtaccatgcccggttccagaatgcggctgcgatcctgaccataaacacccacgtcatggacatccagtcctaaccagtggctaaggccatgcataaagaaaggacgatgggcgttctgagcgatcagttcatcaacatcacctttcaggatgccgagttttaccaggccgctaaccatgatgcgcaccacttcaccagtgacttccagaatggaagttcccggacgatacaggcgcaggctggtttcgagagactccagcacaatgtcgtagatttcacgctgggcctgggtgaatttgccgttgaccgggaaggtgcgggtaatatcgccagcgtaacctttgtattcacaacccgcgtcaatcaacaccaggtcgccgtcgcgcatttcacactcgttttcggtgtagtgcagaatgcagccgttttcaccgctgccgacaatggtgttataggacggatagcgcgcaccgtggcggttaaattcgtggtgaatttcgccttccagatggtactcgaacattcccggacggcatttttccatcgcccgtgtatgtgccatggcggtgatttctcccgcgcggcggagtacggcaatctcttctgggcttttgaacaggcgcatttcatgaacaacaggacgccagtcgatcatcgttgccggtgcggtgagattttgccggctacctttacgcagtttttccagcgcactgttcacgattacatcagcatatgcatattcgccctgggcatggtaaaccacatccaggccgttaagtagttgataaagttgctgattgatttcgctgaatgccagtgcgcggtcaacgcccagtttctctggcgcggcatcctggcctaagcgacggccaaaccagatctccgccgtcaggtcgcgaacgcggttaaacagaacgctgtggttatgagtgtcatcgcttttaatcagcaccagcaccgcttccggttcgttaaagccggtgaagtaccagaagtcactgttctgacgataggggtattcgctgtcggcgctacgtgttacttctggtgcagcaaaaatcagcgcggcgctgccgggttgcatttgctccaccagggcctgacggcgacgctgaaactcttgccgggatatctcactcataacactctccttacgttttttgtttttagtgtagagtcggtttttgtacttctggcgcggtcggttgcggatgagtaaaggtgtcgtggcataacagcgcggcaacacgaacgtattcgatgatctcttcaaggctcatttcaagctcttcctgatcttcgtcttcgtcgtaacccagttgcgcaatgttacgcagatcgtcgatagcttcaccggtttcgccggtcactttatccagcttcggttgcgtaacgccaagaccaagcaggaagtgattgacccaacctgccaatgcatcagcccgatcgaaaacgctgacatcatcgccatcaggcagataaagctgaaaaaggaagccgtcatcctgcagggcatcgctggtggcagagtgcattttacgcagtgcctgtgccagctcatgaccgaaagccatgccttcgttcgtcaggtcgtgaagtagcggtagccaactgctgtcatcgttaccgccacatatcatcccgctgattaaaccatgcatctcagctggggtcagacccgtcccttgttggttcagatactggttcatttcgttgtaaccaggcatttcgttctgtatagacataagcattcgtcgtcaaagggaggaatattcatgatatgctaccactttgggccctggtggaccagaaaagggcttgtctcttctcatcagggtagctatagtgtcgccccttcgcagaccatgggtctaaagacgaaggcagcgcagtcaatcagcaggaaggtggcatgtctgcacaacccgtcgatatccaaatttttggccgtagtctgcgtgtgaactgcccgcctgaccaaagggatgcgttgaatcaggcagcggacgatctgaaccaacggttgcaagatctgaaagaacgcactagagtcacaaatactgaacagttggtcttcattgccgcattgaatatcagctatgagttagcgcaagaaaaagcaaagactcgtgactacgcggcaagtatggaacagcgtattcggatgctgcagcagaccatagaacaagcgttacttgaacaaggtcgcatcaccgaaaaaactaaccaaaactttgaatgacacttttcggtttactgtggtagagtaaccgtgaagacaaaatttctctgagatgttcgcaagcgggccagtcccctgagccgatatttcataccacaagaatgtggcgctccgcggttggtgagcatgctcggtccgtccgagaagccttaaaactgcgacgacacattcaccttgaaccaagggttcaagggttacagcctgcggcggcatctcggagattcccttcttatctggcaccagccatgacgcaactaccagaactcccactgacattatcccgacaagaaatccgcaaaatgattcggcaacgtcgtcgtgcgttaacgccggaacaacagcaggaaatgggtcaacaagccgctacccggatgatgacttatcccccggtggtgatggcacatacggtcgctgtattcctctcttttgatggcgaactcgacacccagccactcatagaacaactctggcgcgccggtaagcgcgtatatcttccagttttgcatccctttagtgccggtaatttgctgttcctgaattaccatccgcaaagcgaactggtgatgaacaggttgaagatccatgagccaaaattggatgtgcgtgacgtgctacccctttcccgattagacgtgctgatcacaccgctggtcgcctttgatgagtacggtcagcgcctgggaatgggcggtggtttttatgatcggaccttacaaaactggcagcactataaaacgcaaccggtgggttatgcgcatgattgtcagttggtggaaaaactccccgttgaagagtgggatatccctcttcctgcggtggttacaccgagcaaagtctgggagtggtaagggcgatacacccgcatcgccctgattgacatcgttgattctttgacctaatttagtgagtaagggtaagggaggattgctcctcccctgagactgactgttaataagcgctgaaacttatgagtaacagtacaatcagtatgatgacaagtcgcatcataacccttctccttcaagccctcgcttcggtgagggctttaccgttacagccccatgctgccctgccatcgtaaatccccattaaataaacacaacgcattgatctgactttgatttattttctggagcagactcgcaaagtagaatgcgcaacgcggcaacggtgtggagaagggataaaaaaacgggcaagtcagtgacctgcccgttgattttcagagaaggggaattagtacagcagacgggcgcgaatggtacccggaatagctttcattgcctgcagcgctttttcggcaacgtcttcgtcggcttcaatatcaataaccacataacccatctgggcggaagtttgcagatattgcgcggcgatgttgacgccctgctcggcgaagattttgttcagcgcagttagcacgcccggacggttttcgtggatgtgcatcagacgacgcccaccgtgcagtggcaggctgacttccgggaagttcaccgcagagagcgtactgccattgtcagaatacttgatcaatttacccgcaacttccaggccgatattctcctgcgcttcctgagtgctaccgccaatgtgtggcgtcagaaggacgttgtcgaattcacacagcggagaggtaaatggatcgctattggtcgccggttccgtcgggaatacgtcgattgccgcccccgccagatgtttgctcgccagcgcatcacacagcgccggaatatccaccacagtaccgcggctagcattaatcagcaggctgccgggcttcattagactaatttctttcgcgcccatcatatttttggtggacggattctctggtacatgcagactcaccacatcgctcatattcagcaggtcagaaagatgctgtacctgagtggcgttgcccagcggcagtttattttcaatatcataaaagtaaacatacattcccaggctttcagccagaatgcccaattgcgtaccaatatgaccgtagccgatgatacccagctttttgccgcgcgcttcaaaagaacccgccgccagtttgttccacacgccacggtgcgctttagcattggcttccggcacgccgcgcaatagcagcagcagttcgccaatcaccagctccgcaacagagcgcgtattactgaacggtgcgttaaataccgggatcccgcgctttgccgccgcatccagatcaacctggtttgttccgatacagaaacagccaatagcgaccagtttttctgcggcgttgatcacgtcttcagtcagatgggtacgggatcgcaggccgatgaagtgggcatcgcggatggattcttttaattgttcatcatccagcgcgcctttgtgaaattcgatgttggtgtaaccagctgcacgaaggctttccagcgccttttggtgcacgccttctaccagcagaaacttaatcttgtctttctccaggcttacctttgccatttacccaatcctgtcttttgaaatgttgtgtgcggatttgcatccgcctttcaacatatcaaaaaataatattgcggcaatatgaacgtttgcgtcgcgatgttgaggaaatatcacgcaaaggtaattcttggatgaatatgctggtttagaggatttatttagagcaatcgacaattgcctggtaaaagcgtgacacatgtcaccaaatttaatgaagagaatttttttaacgggggaggttcccccgtcagatcatttcacaatggttttgacaccgtcaggtgtgccaatcagcgcaacgtccgcgccacggttagcaaacaagccaacagtcaccacgccaggaatcgcatttatggcgttttccatcgctatcgggtcaaggatttccatgccgtggacgtcgaggatcacgttgccattatcggtcaccacgccctgacggtattccggacgaccgcccagtttcaccagctgacgcgccactgcactacgtgccatcgggataacttctactggcagcgggaatttacccagaatatcaacctgcttggaagcgtctgcaatacagataaatttttctgcaacgctagcaatgattttttcacgggtcagcgccgcgccgccgcctttgatcatttgcatgtggccgttgatttcatctgcgccatcaacgtagatgccaaggctgtcgacttcgttgagatcaaaaacgtgaatgccgaggcttttcagtttttcagtggaagcatcactactggaaacggccccttcaatctggcctttcattgtaccgagcgcgtcaataaagtgtgcggcggtggaacctgtacctacaccaacaatggtgccgggctgaacatactgaagtgccgcccatcctactgcttttttcaattcatcctgcgtcatgatcgtttcgcctgtggtatgaaatttcacacgcattatatacaaaaaaagcgattcagaccccgttggcaagccgcgtggttaactcatccataaaatatcgcgcaatggcaggcatcccctttcgccccgcaaataaagcatacaacggtctgggtatgccgctccacggtgcaaacaggcgcaccagttcaccgttcgcaagcccctgtttacaggcaaattgaggcaataacgccacgccattcaacacaaccagggcgcgaactcgctgagcgaaatgcattagcgcaaatccctgatcttttaagctgcgcttttaaccacggatacaaatgttacccgccgacggcttcggtatatgcaacctgacacaaaattgtgtcatagtgcaggaaaaagcatttaccaggagcagacaacagcaatgaaacgcccggactacagaacattacaggcactggatgcggtgatacgtgaacgaggatttgagcgcgcggcacaaaagctgtgcattacacaaagtgccgtcagtcagcgcattaagcaactggaaaatatgttcgggcagccgctgttggtgcgtaccgtaccgccgcgcccgacggaacaagggcaaaaactgctggcactgctgcgccaggtggagttgctggaagaagagtggctgggcgatgaacaaaccggtagcactccgctgctgcttagtctggcggtcaacgccgacagtctggcgacgtggttgcttcctgcactggctcctgtgttggctgatagccctatccgcctcaacttgcaggtagaagatgaaacccgcactcaggaacgtctgcgccgcggcgaagtggtcggcgcggtgagtattcaacatcaggcgctgccgagttgtcttgtcgataaacttggtgcgctcgactatctgttcgtcagcagtaaaccctttgccgaaaaatatttccctaacggcgtaacgcgtagcgcattactgaaagcgccagtggtcgcgtttgaccatcttgacgatatgcaccaggcctttttgcagcaaaacttcgatctgcctccaggcagcgtgccctgccatatcgttaattctagtgaagcgttcgtacaacttgctcgccagggcaccacctgctgtatgatcccgcacctgcaaatcgagaaagagctggccagcggtgaactgattgacttaacgcctgggctatttcaacgacggatgctctactggcaccgctttgctcctgaaagccgcatgatgcgtaaagtcactgatgcgttactcgattatggtcacaaagtccttcgtcaggattaatccatcaaataatgcctgatagcacatatcaggcgttgtcctcacttctttttgtattccttgaatcacatcacaaaatagacaaatctcaggcggcaaaaaacgacgtctgaatgcattttttttgctggcgacaaacccacgtaaaaagctcaccgtaggcgcaaataccctcattttgattgcgttttacggagcaaataatgtctaacgtgcaggagtggcaacagcttgccaacaaggaattgagccgtcgggagaaaactgtcgacagcctggttcatcaaaccgcggaagggatcgccatcaagccgctgtataccgaagccgatctcgataatctggaggtgacaggtacccttcctggtttgccgccctacgttcgtggcccgcgtgccactatgtataccgcccaaccgtggaccatccgtcagtatgctggttttagtacagcaaaagagtccaacgctttttatcgccgtaacctggccgccgggcaaaaaggtctttccgttgcgtttgaccttgccacccaccgtggctacgactccgataacccgcgcgtggcgggcgacgtcggcaaagcgggcgtcgctatcgacaccgtggaagatatgaaagtcctgttcgaccagatcccgctggataaaatgagcgttagcatgaccatgaatggcgcagtgctaccagtactggcgttttatatcgtcgccgcagaagagcaaggtgttacacctgataaactgaccggcaccattcaaaacgatattctcaaagagtacctctgccgcaacacctatatttacccaccaaaaccgagtatgcgcattatcgccgacatcatcgcctggtgttccggcaacatgccgcgatttaataccatcagtatcagcggttaccacatgggtgaagcgggtgccaactgcgtgcagcaggtagcatttacgctcgctgatgggattgagtacatcaaagcagcaatctctgccggactgaaaattgatgacttcgctcctcgcctgagcttcttcttcggcatcggcatggatctgtttatgaacgtcgccatgttgcgtgcggcacgttatttatggagcgaagcggtcagtggatttggcgcacaggacccgaaaagtctggcgctgcgtacccactgccagaccagtggctggagcctgactgaacaggatccgtataacaacgttatccgcaccaccattgaagcgctggctgcgacgctgggcggtactcagagtctgcataccaacgcctttgacgaagcgcttggtttgcctaccgatttcagtgcacgcattgcccgcaacacccagatcatcatccaggaagaaagtgaactctgccgcaccgtcgatccactggccggatcctattacattgagagcctgaccgatcaaatcgtcaaacaagccagagctattatccaacagatcgacgaagccggtggcatggcgaaagcgatcgaagcaggtctgccaaaacgaatgatcgaagaggccagtgcgcgcgaacagagcctgatcgaccagggcaagcgtgtcatcgttggtgtcaacaagtacaaactggatcacgaagacgaaaccgatgtacttgagatcgacaacgtgatggtgcgtaacgagcaaattgctagcctggaacgcattcgcgccacccgtgatgatgccgccgtaaccgccgcgttgaacgccctgactcacgccgcacagcataacgaaaacctgctggctgccgctgttaatgccgctcgcgttcgcgccaccctgggtgaaatttccgatgcgctggaagtcgctttcgaccgttatctggtgccaagccagtgtgttaccggcgtgattgcgcaaagctatcatcagtctgagaaaagcgcctccgagttcgatgccattgttgcgcaaacggagcagttccttgccgacaatggtcgtcgcccgcgcattctgatcgctaagatgggccaggatggacacgatcgcggcgcgaaagtgatcgccagcgcctattccgatctcggtttcgacgtagatttaagcccgatgttctctacacctgaagagatcgcccgcctggccgtagaaaacgacgttcacgtagtgggcgcatccagtctggctgccggtcataaaacgctgatcccggaactggtcgaagcgctgaaaaaatggggacgcgaagatatctgcgtggtcgcgggtggcgtcattccgccgcaggattacgccttcctgcaagagcgcggcgtggcggcgatttatggtccaggtacacctatgctcgacagtgtgcgcgacgtactgaatctgataagccagcatcatgattaatgaagccacgctggcagaaagtattcgccgcttacgtcagggtgagcgtgccacactcgcccaggccatgacgctggtggaaagccgtcacccgcgtcatcaggcactaagtacgcagctgcttgatgccattatgccgtactgcggtaacaccctgcgactgggcgttaccggcacccccggcgcggggaaaagtacctttcttgaggcctttggcatgttgttgattcgagagggattaaaggtcgcggttattgcggtcgatcccagcagcccggtcactggcggtagcattctcggggataaaacccgcatgaatgacctggcgcgtgccgaagcggcgtttattcgcccggtaccatcctccggtcatctgggcggtgccagtcagcgagcgcgggaattaatgctgttatgcgaagcagcgggttatgacgtagtgattgtcgaaacggttggcgtcgggcagagcgaaacagaagtcgcccgcatggtggactgttttatcagcttgcaaattgccggtggcggcgatgatctgcagggcattaaaaaagggctgatggaagtggctgatctgatcgttatcaacaaagacgatggcgataaccataccaatgtcgccattgcccggcatatgtacgagagtgccctgcatattctgcgacgtaaatacgacgaatggcagccacgggttctgacttgtagcgcactggaaaaacgtggaatcgatgagatctggcacgccatcatcgacttcaaaaccgcgctaactgccagtggtcgtttacaacaagtgcggcaacaacaaagcgtggaatggctgcgtaagcagaccgaagaagaagtactgaatcacctgttcgcgaatgaagatttcgatcgctattaccgccagacgcttttagcggtcaaaaacaatacgctcagtccgcgcaccggcctgcggcagctcagtgaatttatccagacgcaatattttgattaaaggaatttttatgtcttatcagtatgttaacgttgtcactatcaacaaagtggcggtcattgagtttaactatggccgaaaacttaatgccttaagtaaagtctttattgatgatcttatgcaggcgttaagcgatctcaaccggccggaaattcgctgtatcattttgcgcgcaccgagtggatccaaagtcttctccgcaggtcacgatattcacgaactgccgtctggcggtcgcgatccgctctcctatgatgatccattgcgtcaaatcacccgcatgatccaaaaattcccgaaaccgatcattagcatggtggaaggtagtgtttggggtggcgcatttgaaatgatcatgagttccgatctgatcatcgccgccagtaccagtaccttcagtatgacgcctgtaaacctcggcgtcccgtataacctggtcggcattcacaacctgacccgcgacgcgggcttccacattgtcaaagagctgatttttaccgctagcccaatcaccgcccagcgcgcgctggctgtcggcatcctcaaccatgttgtggaagtggaagaactggaagatttcaccttacaaatggcgcaccacatctctgagaaagcgccgttagccattgccgttatcaaagaagagctgcgtgtactgggcgaagcacacaccatgaactccgatgaatttgaacgtattcaggggatgcgccgcgcggtgtatgacagcgaagattaccaggaagggatgaacgctttcctcgaaaaacgtaaacctaatttcgttggtcattaatccctgcgaacgaaggagtaaaaatggaaactcagtggacaaggatgaccgccaatgaagcggcagaaattatccagcataacgacatggtggcatttagcggctttaccccggcgggtagcccgaaagccctacccaccgcgattgcccgcagagctaacgaacagcatgaggccaaaaagccgtatcaaattcgccttctgacgggtgcgagtatcagcgccgccgctgacgatgtactttctgacgccgatgctgtttcctggcgtgcgccatatcaaacaagctccggtttacgtaaaaagatcaatcagggcgcggtgagtttcgttgacctgcatttgagcgaagtggcgcaaatggtcaattacggtttcttcggcgacattgatgttgccgtcattgaagcaagcgcactggcaccggatggtcgagtctggttaaccagcgggatcggtaatgcgccgacctggctgctgcgggcgaagaaagtgatcattgaactcaatcactatcacgatccgcgcgttgcagaactggcggatattgtgattcctggcgcgccaccgcggcgcaatagcgtgagcatcttccatgcaatggatcgcgtcggtacccgctatgtgcaaatcgatccgaaaaagattgtcgccgtcgtggaaaccaacttgcccgacgccggtaatatgctggataagcaaaatcccatgtgccagcagattgccgataacgtggtcacgttcttattgcaggaaatggcgcatgggcgtattccgccggaatttctgccgctgcaaagtggcgtgggcaatatcaataatgcggtaatggcgcgtctgggggaaaacccggtaattcctccgtttatgatgtatagcgaagtgctacaggaaagcgtggtgcatttactggaaaccggcaaaatcagcggggccagcgcctccagcctgacaatcagcgccgattccctgcgcaagatttacgacaatatggattactttgccagccgcattgtgttgcgtccgcaggagatttccaataacccggaaatcatccgtcgtctgggcgtcatcgctctgaacgtcggcctggagtttgatatttacgggcatgccaacagtacacacgtagccggggtcgatctgatgaacggcatcggcggcagcggtgattttgaacgcaacgcgtatctgagcatctttatggccccgagcattgctaaagaaggcaagatcagtaccgtcgtgccaatgtgcagccatgttgatcacagcgaacacagcgtcaaagtgatcatcaccgaacaagggatcgccgatctgcgcggtctttccccgcttcaacgcgcccgcactatcattgataattgtgcacatcctatgtatcgggattatctgcatcgctatctggaaaatgcgcctggcggacatattcaccacgatcttagccacgtcttcgacttacaccgtaatttaattgcaaccggcagcatgctgggttaatgactcgtcccgtcacgatcttcagcaatatgctgaagcatcgtggcggtataacgatgatttctgatactataaagatattcctgcatatacatcggcctgtgcggtgcatcaaaatatttcagcgttgccggattcaccagtcgccaggcaaaatgcgggatcaccgtcagaaaatgtccgcgctccacggcgctgattttggccataaaactgtagggacgataaataatggttggattgatcccacaaggtcgcatattcgcatcaatcattgcttcgaagttggcccggttctgaaagcgcatttgtagccagggcagctcctgaagcagctcttgctcttgtcgctcttcataacggcgagaaacgagaaagcctaatcgcagcggtggtagttcactgatagtcaggttttccagttcctgaactcgtgcagatacatgctgtggggagataataaaatctaactggcggtcaaaaagattatcgataacgccattttcgctgaactcaactggctgggcggtcacgccttcatacttatctccgagactaatcaactgatcgaaaataattgtcggataagtattatctatgccaatcacaatttctcgactacgacgcccactgttatggatttcattatcaatcgcagaaagccgttgataaaccgggaacagtttttgatacagttcctgtccggctttattgaggctgatattattatctttgcgggtaaatagcgtatagccaatttgttcttccagcgcggcaatgcttttaccaaatgggctagccgtcatatggattttttctgccgcccgggcaatattattggtttgcgctaataaaatgaaattgcgcatctttttgctaataaaaatgtccatccccctcccccgcatccttgtccgcttaaccgtttcagtcagcctatccttgatgaaaccgcgagcaaagataggtgattacgtcatggttttacagaaaattacagaaaaaggaggcaatatcgggtaaaggcattagcccgacgaatacgtcgggctacaaatattattgtgctgcaggtgttttagcgggttgttgatccacaggttctaactggaagaccacatcgacctgatcatcaaactgaatagcggcctgctcgtaagtttcctgggcggacaccggcgcggcatcggctttcatcatccgcaccattgggctgggctgatagttggaaacatggtagcgcacgctatataccggccccagtttacgatgaaagccgttcgccagttcctgcgcctgatgaatcgcgttatcaatcgctgccttacgcgctttgtctttataggcatccggctgcgccacgcccaggctcacagaacgaatttcgttaagacccgccttcagcgcgccatccagcaaggaattcagtttgtctaactgacggagcgtgacttccaccgttctcacagcgcggtagcctttaaggatacttttaccatcctgataatcataatctggctgggtgcgtaagttcgcactgctgatatcttttttcgcgatctgattgagttcaaggaaggaaatgtattgtgcgacgcgctcatctgcctgtttcttggcagtagcggcatccttcgcggccacgttaacttcaatcgcaagagtggcaatgtctggcaccgcatccacgcttgccgtaccggaggtgacaatatgcggtccatccggcaattcgttagcctgcgctgccatcccgctaatacccattaatgccgccagggcgataactttgaacttcacgttagtctctccgtgttaattgacttgcccaaaattcaggacctctggaggcaagcttagcgcctctgttttatttttccatcagatagcgcttaactgaacaaggcttgtgcatgagcaataccgtctctcgccagctgcaaggcaataaaccacataacacatcccacaaccagattgataatgcgctgtgcttttgccgtgcgcagacgcggtgccagccaggctgcgagaagagccagaccaaagaaccacaggaaagaggcgctaattgtcccgagtgcaaaccagcgttttggttccacatcaagttgcccgccaaggctgcccagtacaacaaaagtatccaggtaaacatgcggattcagccaggtcactgccaacatggtggcgataattttccatctgccttgcttcatgacttcggcgctggctaactcaatattactgctcattgctgttttaaaagcgccaaaaccataccacagcaagaaggctacgccgccccaggtgaccagcgccagcaaccacgggctctgcatcaataacgcgctgccaccaaaaatcccggcgcaaatcaggaccaaatcgctgatagcacaaagtaaggcaatcataatgtggtactgacgacgtatgccctgattcatcacaaaagcattttgtggaccgagcggtaggatcatagccgccccaagtgcaagaccttgaaagtaataagaaaacacgttggatattccgaattaagtatctgatgcagagactatatcgcgggattgttattagcggaaattgataatattaattggcaatcagaaaaactaataagagagaggccagagagtattatctggcctcagcgttgattacgcagctttgtcttctttcacccgcttaaagttcacatccatttgcgggtacgggaagctgataccggcggcatcaaattcacgtttaatacgctccagcacatcccagtacacgttttgcagatcgccgctgttgctccagacgcggaccacgaaattaatgctgcttgcaccaagttcgttcaggcgcacagtcatttcgcgatctttcaaaatgcgatcttcagactggataatattggtcaggatctgcttaacctgatcgatatcggaatcatacgccacgccaataataaattcgttacggcgaactggctcgcgggagaagttaataatatttccggcaataattttaccgttcggaataacgataattttaccgtctgcagtacgcatggtggtggagaaaatctgcacactcagcacagtaccggctacgccgcccaggtcaacatattctccggcacggaacgggcggaacatgacaagtaacacgccagcggccaggttagacagactcccctgcaaagccagaccaacagctaagcctgcggcaccgagtacagcaatgacactcgcggtttgtacacccacgcgtcccagtgcagcgattagcgtaaaggcgataataccgtaacggactaatgcagaaagaaaatcagcaacagtggcatcgattttacgggagatcatcaggcgattcaccgcgttggaaatcatccgcgcgataatcaaaccaacgatgatgatcgcgagtgccgccacgatgtttactgcataacttagcagcagcgcctggttagctaccagccagcttcccgcgccgtttatgctatcgacaacattcaaatcttccattcaatattccttttcaactgactcaaaatggagaaatacactccgccgccttatgacgggcagtctgacaagggtaaacaataaagcataattttgccaaatagatcacagatttctcatctgaatcaccttgcttttggcgaaaaaatccccgcagagcggggctcagacagatatcaatgtgcgctttgtcatgccggatgcggcgtgaacgccttatccggcctacaaaaacctgcaaattcaatatattgcaggatacgtgtaggcctgataagcgtagcgcatcaggcaattttgcttttggcgaaaaaaagacccgcagagcgggccttgagataagcagaaaggaatatcttacagaacgtcgatcgcgttcagttcctggaatgctttctccagacgagcgatcatgctagtctgaccggcacgcagccatacgcgcggatcgtagtatttcttgttcggctgatcttcgcctttcgggttacccagctgaccctgcagataagcttcgttcgctttgtagtagttcagaacgccttcccaggttgcccattgggtatcggtatcgatgttcatttttactacgccgtagcttacggagtctttgatttcctgagcagtagaaccggaaccaccgtggaatacgaagttcaggctgttgtgcggcaggttgtgtttcttggaaacatattcctgagaatcacgcaggatggtcggagtcagaaccacgttacccggcttgtaaacaccgtgtacgttaccgaaggacgctgcgatggtgaaacgcgggctgattttgctcagttcggtgtatgcgtaatcaacgtcttccggctgggtgtacagtgcagaagcgtccatgtggctgttgtccacgccgtcttcttcaccaccggtgcaacccagttcgatttccagagtcatgccgattttggacatgcgctccaggtatttagagcagatttcgatgttctcttgcagagattcttcagacaggtcgatcatgtgagaagagaacagcggcttaccggtagctgcgaagtgtttttcacccgcgtccaacagaccgtcgatccacggcagcagtttcttcgcgcagtggtcagtgtgcaggataaccggaacaccataatgttcagccatctggtgaacgtgatgcgcaccagagatcgcgcccaggatagcagcaccctgcggaacgtcagatttcacgcctttaccagcgataaaggaagcaccaccgttggagaactgaacgataaccggcgctttaactttagcagcggtttccagtacggcgttgatggagtcagtaccgacgcagtttactgctggcagtgcgaagttgttttcttttgctacctggaaaactttctgtacgtcatcaccagtgattacgccaggttttacgaaatcaaaaatcttagacatgtctcttgtcctgtatcgtcgggccttatactcgtcatacttcaagttgcatgtgctgcgtctgcgttcgctcaccccagtcacttacttatgtaagctcctggggattcactctcttgtcgccttcctgcaactcgaattatttagagtatgaaaaattgcgtgctctaaaagcgcgctgaaacaagggcaggtttccctgccctgtgattttttacttcttagcgcgctcttcgagcatcgctactgcaggcagtactttaccttccacgaattcgaggaatgcgccgccgccagtggagatgtaggagattttgtcagcaatgccgaacaggtcgattgctgccagagtgtcgccgccgccagcgatggagaacgcttcgctgtctgcgatagcgttagccacgatttcagtacctttgcggaagttcgggaattcgaacacgccaaccggaccgttccacagaatggttttcgcattcttcaggatttcagccagttcctgagcggaagcatcaccgatatccaggatctgctcgtcagctttcacatcgttaacagatttcagggtagccggtgcagtttcagagaactcggttgctacgcgaacatcagacggaaccgggatgttgcaggtggtcagcagacgtttagcttcgtcaaccaggtcagcttcgtacagggatttacccacatcgtggccttgtgccgcgataaaggtgttagcgataccaccaccaacaatcagctggtcagcgattttagacagggagtccagaacggtcagtttggtagatactttagaaccaccaacgatagccaccatcgggcgagcaggttctttcagtgctttacccagcgcgtccagttcagctgccagcagcgggcctgcgcacgcaacgtcagcgaatttaccgataccgtgagtagaagcctgcgcgcggtgagcagtaccgaatgcgtccattacgaacacgtcacacagtgcagcgtattttttggacagggtttcgtcgtctttcttctcgcctttgttgaagcgaacgttttccagaacaaccagttcaccttcagcaacgtcaacgccgtcgaggtaatctttaaccagacgaaccgggttagacagtttgtctttcaggtagttaacaaccggcagcagagagaattcttcgttgtactcgccttcggtaggacgacccaggtgggaagttaccatcacttttgcgccttgtttcagggccagttcgatggtcggcagagaagcacggatacgcgcgtcgctggttactttcccgtcttttactggtacgttcagatccgcacggataaatacacgtttcccagcaagatccagatcggtcatcttaattacagacatggtgaatcctctcgttgattctaaaagttttgcagacgctgcttgcgtcttacctgaaagcaacagtagccatagctaacgtcgtgtcgagcattcggttagcaaagccccattcgttatcgcaccagaccaacgttttgatcaggtgtgcgccactgacccgggtttgggtgccatcgacaatggcactgtgcggatcgtggttaaaatctacagagaccaacggcaattccgtatagtcaactataccatgaaatgcaccttgtgctgctttttgcagcaacaggttgacttcattggcttttacaggtttcttcaccgtcacgcttaaatcgattgccgtcacatttatggttggcacacgtaccgcaatcgcttcaaagcgatcgttaaattgcggaaaaaatcgtgtgataccggcggccagtttagtatcgaccggaatgatgctctggctggctgcccgggtgcgacgcaggtcaggatggtatgcatcaataacctgttgatcgtgcatggcggagtgaattgtggtcacagtgccggactcaataccgtacgcatcatctaacaatttgatgacgggaattatgcaattcgtggtacaggaagcgttagaaacgatgcggtgttccgcacgaagttgatcctgattgacgccgtaaacaacggtcgcgtcgagatcgttactgccaggatgactaaagagcacttttttggccccggcggcaatatgcgcttcgccatgctcgcgggagccatatacgccggtgcagtcgaggactacatcaacgccaagttcacgccaggggaggctttgcagactacgttcatgcaatacgcggatggcgtcatcaccaacaaaaagttgatcgcgttcctgtcgtacttcccatgcaaaacggccatggctggtgtcatatttcaacaaatgcgccatgcccgcagcatccgccagttcgttgattgccaccacggtaatttccgcccggcgtccggattcatacaaagcacgaaccacattacgcccgatgcgaccgaagccatttatcgctacgcgtacggtcatagatctcctgcaaggttttccctgagcaaatttgccagacagagtaatccagcaaatcgtccggggaaaccttacctgtcgcaaactgcgactgattggttaattgtcgaacatttaatcgactgaaacgcttcagctaggataagcgaaacgtggaataaaaggaatgtttgtccagccgaagaagacatttatctgactcacatcacacttttatccccttttgtgggaagctttattccaggctggcgtaataataaccctacaataactggaataaattgtcagcttgtgaagtgataccggccttcttcagtcatctctactatcagattggcctgacggctattcatcagcacacgctcgacattggggccatcggtgcgggcataaaatgcttcggctacttgccgcgttaatcctcccgcaattttacgactaatcaagcgctcccgcagaatttgagcaggtgcatgaataaaaatagaaaaatcgcagaaagatgccaactccagccacttttcatcatccagtaacaaccagtttccttcgacgatgacgagtggtgcggtaacgtgcaacgcatcttcaacaggatcatgcttttgtcgatcgtactgcggccacgtacaatccccttccacgacctggcgcagattttccgtcagtttcgcaacgtcaaatgtctctggtgcgcctttgaaggggcgcaattgatgcgcatccagccagctattgtaatggtgaaaaccatccatcgggagcgtctgaatagcgggcagttccgggtcttgttgcgcgagatattcccagaaggtggttagggtacttttacccgtccccggcggagcgcaaagaaaaaccaccgtacgccgctgcggatttaccgtctgtaaggccgccaacatgtgcagcaacggtttatgtacattttcaatctcttcgttctggtactgtgcctgtatcttcagcccattcaccgttaattcaattttcacggcgttaattcctttaaggtggtcgttactgccagcgtcagcgccgttttgaccattccgctaaaacgcgcctcactccagacggagaaatcagcgaacttcatcgcttttaacgcgtcatagagcatcgcattgcgggttatgctattgacgttgctgataaaatcccaggtcatgtcatcggcaaatccgggcgtttcatcctgttcgttcaggtaatgccagaactgggaaaaatgcgtgatatcggcgtacaaccatttatccattttcccaacgcataaatcaaacgcagtgcaacatcaatatcgtcaagcgggccgctttgggcgagtaacggcttcactgcatattccacgatctcttcatcgttatcgacaaacaggctcggcagaaactggcgtatcccctggagcaaaatggtatgcgcagttttcataaaactaaataaattgtcctgtgcatccagttgctcaagcacatcatcttctgtcagcgtcgccattggtcttccgatagatcaccatcaatgcagggagtctattatattacacgtttggtccgcgccgccgatcagtaatgtctgcgtccgcaccccattcgccgtctgttggataccgttcaccagctcaccgcccgtcacgcccgtagcgctaaagaggatatcgttccccctcaccagttcatcgaggctgtacacacggttaacgtcaacgcccattgccttgcaacgcttgcgctcctgctctgcaatctgccgattttccgtgtaatcccctttagcctggcaaaagtcaatcagctcggcctgcatatccccgcctaatgctttaacggcacaggcagaaatcacgccttctggcgcaccgccgatggtgtacatcacatcgtaaggattatcctgccagcaggtcagcacgctggcggcgacatcgccatccggcagggcaaaaaccttcacgcccagctgtgttgcttcctcaatcgcggcactcaggcgcggtttatccagcgtaaccatgcgcagcttatccagcggtttgcctaacgctttcgccacgttgcgcaggttgtccgtcagaggcaaagacagatcaatcgcgcccgccgccagccgattaacaaccagctttttcatatacatatcgggcgcatgtaacaggctatctcgaggggcgaaagccatgaccgccagcgcattgctctgccccatcgccaccatccgcgtgccttcaatgggatcaaccgcgatatcgacttctggcccatcgcctttgcccacctcttcgccaatccacagcatcggcgcatggtcaatttctccttcgccgataaccactcgtccacgaaaagcgacgtcgtttaatgcctggcgcatcgcggtgaccgccaggccatcaattttatttttgtcgccacatccggtttgcggccaggcagccaacgctgcctgttccgtaacgcgaaataatggccacgccagggacatcattgcgcggcctccccgatatcaacgccaaattgtgccagcagatatttctcggcctgttcattccagatgccgtgcgtttcctcaaccagccgcgccaactctttaaacagcggatcggttttgcctttttcggcaaaatcggcaatggcagtgagcggcatggtcacgccgttataaatgagttttttaccgccagggatatccggcagattgagcacggtttctggcaccgcatccaggccaccgatatgggtcaccataaagctcggctgtaactgcccagtggcgctaagggcaatcgcctctttcatgtcgtccgtactaccgccagatgtaccgacgacgtgcgtgctgttgtaatggacgttgtagaaattaaacggcactttgaagtttttatccgtcggcccggcaaagaagttcagacagccatcttccgccagtaattcatcagccatctcaacgacagcaggcaccgccgcataaacaaaaatgtcatcgaacccggcatctcctgtcagcgcccgcagcatctggacaggatcgctcatccctttggtattcacatacaccagctcaatgcctttactggccgccagttccaccggcagcagcttctgtacctgcgccagacgtttgtcgtcgatatcgaccaccaccacccggctcggttgtatgccgccgttaatggcgtaatcgatagcgccaatgcccatcggacctgcacacgccagcagtgcaatattgccgccaggtttgacgcccatgcgatgctcataaacatattgcgtggtgtgataattggcatgataagcaccaataatgcagcacataggctctgccaggctcgccgcagcaaaataagagccgtgatacggtaatacgcagcccaaattaatggcgatttcgggaataatcatataagtggcattgccgccaaaatattcgtagctgtagcccgcactatatccgcttggtaaccccatcgccggttgcaatacaaaacgctggccttttttatatttgccagtgagatttttacccacttcgacaataaccccggcacattcatgcccggtaatgaccggatgattttctaaatcgtcgggtacgcgtttatgttcactaccgagtaacgccgctttccaggtgcttaaacagacgctgtcagaaattacactcaccagtaattcattatcggtaatttctggcagttcaaatacgcgcagacggacatcccgcttgccataaatagcagcaactttggttttcatttttacctctgtaatcagtgtttatgttcggcggttaattgattaaataaagtgtcgagttttggatcgccaatatagttattaatcaatatcagtggtttatccgtcacacgtttcacgcgcccttccagactggcatgagtaacgacgatatccgcatccgcaggcacgttttctatggcgtaatgttttacttcaattgccagccccgctttttccaggcgtttacggaaggtggtcgcgcccatcgcactggagcccatccccgcatcgcaaacaaaggcgatacgcttaaccctgcttaagctgaatgcaccctcttgtttcatcgccttaaccgcattggcactctgagcaaactcatcttcgctctccgtttccaccgttttttccatcttcagtatcaggctagtaatagcaaaggacaccagggtacctaccgtaacaccggcaattgtcgccaggaagctgcctttcggcgtcagtgccaggtaagcaaagatagaccccggacttgggccagccaccagaccaccgtccagtaagttaaacatccaggtgccagacataccgcccgcaatcatggcaataatggtcagcggcttcatcagcacatacgggaaatacagttcgtggatcccaccgaggaagtgaataatcatcgccccgggcgcagaacgtttactcatccctttaccaaacaaggtaaacgccagcagcagccccaggcccggacctgggttagaggccaccataaagaagatggatttaccgttaacgctagcctgttgcattcccagcggataatagacgccctgatcgatcgcattattgaggaaaagcactttcgccggttcattgatgacactcaacaatggcagataacccgcatgtaccagcgcctcaatacactctttgacgaaagtattggcaattaacaccgccgggccgataacttcaaaacccagcagacaaaggagcatccccgcgatacctaaactgaagttattgataaccatctcaaaaccggcaggtatgcgtttttccagtgccttatcgacatattttatgaccaacccaccgagcggccccatgatcatactgccaaggaacatcgggatctctgcgccaacgatcacaccaatagtacctattccgcccatgaccgccccgcgtttaccgccgaccagatgaccacctgtagaaccaatcatcacgggcaataaataggtaatcatcgggccgacaattttggcgaaatgttcgttaggcagccaaccggtgggaataaataacgcagtaataaaaccccaggcaataaaagcaccaatattggggatgaccattgcagtcaaaaagcccccaaaagcctggacctttgcacgagcagacttgttttccataatattatcctgtagaggagagagtaattatccgcggctgataatgtccgctaattgtttttcactacttgctgttaagagttgttcgagtatttcttcttcgcacagtaattcacttaacgcctgaatagcgccaatgtggctatcggcatcggcagcagagagtccgatgagtaatttaattggttcgtcattccccggaaaataaacaccttgttcaagtaatgtcaaagacatcccggttttaagcgccccacattccggtcgcgcatgaggcattgccacgcctggtgcgagaatataataagggccattgttaatggtggaatctttaattgcctgaatgtaattctcgctgatatagtttttatccagcaaacttaccatgctgaaatcgatagcttcctgccaatcttttgcactatgtataacactgatactactttctggaaaataatcactaagccgcataaattatccttattttatttttagggtaccgtccggcggtaaaaataaaatactcgtgcggtttaatgaaagcaattgagcagggaaaccggtgttttgaaaacagtgaattattaatttcttatataacattgagttatagatataacaacaaatgtcaatacgcatatcgtgatgcatattacataattgatatttattgcatataaatatttgtgatctacaacacgccttatctattgcttgtccgcaaacggacatatcaaggtaataaaaaaggtcgccgaagcgacctttttacccgaaatgctaattacagcagttcttttgctttcgcaacaacgttatcaacagtgaagccgaactcttcaaacagcagctctgccggagcagattcaccgaaggtggtcataccgacgatagcaccgttcaggccaacatacttgtaccagtagtcagcaatacccgcttctacagcaacgcgtgcagtaaccgctttcggcagtacggattcacggtaagcagcatcctgcttgtcaaatgcgtcggtagacggcatggacaccacgcgcgctttcacgccttcggcagtcagtttttcgtaggcagcaacagccagttcaacttcactaccggtagcgatgaaaatcagttccggctgaccggcgcagtctttcagcacataaccaccgcgcgcgatgtttgccagttgctcttcagttcgttcctgctgcgccaggttctgacgggagaggatcagtgcggtcgggccgtcctgacgctcaacaccgtatttccacgcgaccgcggattcaacctggtcacacggacgccatgtagacatgttcggggttacgcgcagagaagcgacctgctcaaccggctggtgagtcgggccgtcttcgcccagaccgatggagtcgtgggtgtaaaccatcacctgacgctgtctcatcagcgcagccatacgtacggcgttacgtgcgtattccacgaacatcaggaaggtggaggtgtacggcaggaagccaccgtgcagggagataccgttagcaatcgcggtcataccgaactcgcgaacaccgtagtggatgtagttacccgcagcatcttcgttgattgctttagaaccagaccacagggtcaggttagacggcgccaggtcagcagaaccgccgaggaattccggcaacagcggaccgaacgcttcgatagcattctgagacgctttacggctggcgattttcgccggattagcctgcagtttagcgatgaactctttcgctttagcgtcgaagtcagacggcatttcgcctttcatacggcgggtaaattcagcggcttcctgcggataagctttcgcgtaagcagcgaatttctcgttccatgcggattctttcgcctggcctgcttctttcgcatcccactgagcatagatttcagacgggatttcgaacggcgcatatttccagcccagttgttcgcgggtcagggcaatttcagcgtcgcccagcggcgcaccgtgggagtcgtgggtaccggctttgttcggggaaccgaaaccgatgatggttttgcacatcagcagggaaggtttgtcagtcactgcgcgcgcttcttctactgcgcgtttgatagatgccgcgtcatgaccgtcgatgtcgcgaataacgtgccagccgtaagcttcgaaacgcattgcggtgtcgtcggtgaaccagccttcaacgtgaccatcgatagaaataccgttgtcatcgtagaatgcaatcagtttacccagcttcagcgtacccgccagagagcaaacttcgtgggagatgccttccatcatgcagccgtcgcccatgaaggcgtaggtgtagtggtcgacaatgtcgtggcccggacggttaaactgcgccgccagcgttttttctgcaatcgccataccgactgcgttggcaataccctgacccagcggaccggtggtggtttccacaccagcggtgtaacccacttccgggtgacccggagttttagagtgcagctgacggaagtttttcagttcttccatcggcagatcgtaaccggtgaggtgcagcaggctgtagatcagcatggagccgtggccgttggacagcacgaagcggtcacggtcagcccaggacggattctgcgggttgtgtttcaggaaatcacgccacaggacttcggcaatgtcagccatacccataggggcacccgggtgaccggatttggctttctgtactgcgtccatgctcagcgcacgaatagcattggcaagctctttacgactggacattttgactccagatcggatgatgaagggcacgcccttaacgacttgacgacagcgcgttttgggctacgccggaaaatttgccaacaatttaccacaagccgcgcgtcatgtacatggaacatccttttgccgcttcagaaatctctggatcatgctcgcatgttgcgcaatctactcgcccgtccgctgcgcttttccttatactgagactgagcgtcgattcacctgcaaacggcgcatttttagaataatcctgaccttgtgcggaagagaaaacatgaaaattcgcgccttattggtagcaatgagcgtggcaacggtactgactggttgccagaatatggactccaacggactgctcagtagtggagcggaagcttttcaggcttacagtttgagtgatgcgcaggtgaaaaccctgagcgatcaggcatgtcaggagatggacagcaaggcgacgattgcgccagccaatagcgaatacgctaaacgtctgacaactattgccaatgcgctaggcaacaatatcaacggtcagccggtaaattacaaagtgtatatggcgaaggatgtgaacgcctttgcaatggctaacggctgtatccgcgtctatagcgggctgatggatatgatgacggataacgaagtcgaagcggtgatcggtcacgaaatggggcacgtggcgttaggccatgtgaaaaaaggaatgcaggtggcacttggtacaaatgccgtgcgagtagctgcggcctctgcgggcgggattgtcggaagtttatctcaaagtcaacttggtaatctgggcgagaaattagtcaatagccaattctcccagcgccaggaagcagaagccgatgattattcttacgatcttctgcgccaacgcggcatcagcccggcaggtcttgccaccagctttgaaaaactggcaaaactggaagaaggtcgccaaagcagtatgtttgacgaccatcctgcatccgccgaacgcgcccagcatattcgcgatcgcatgagcgcggatgggattaagtaaagcctggtggtgtcgaacgtaggtcagataaggcgttcacgccgcatctgacatgaatggcacatttgttaccttgtgcgcattgccggatgcgatgctggcgcatcttatccggcctacgggtgccgaacgtaggtcggataaggcgttcacgccgcatccgacattaatggcacgttttacccgtgcgcatcgcatctggtgcttactcgccctttttcgccgcctgaatatacagcatttccagcgccagcgttgccgctgccagagcagtgatttcgctctgatcgtatgccggagccacttccactacgtccatcccaacaatgttgagatctttcaggccgcgtaccagtttaatagcgcgatcggaggtcaggccgccaatcactggcgtaccggtgcctggtgcaaaagcaggatccaggcagtcgatatcaaaagtcaggtaaaccggcatatcacccacaatctgtttcacttgggcgataacgtcatccacgctgcgatcgttcacctggcaggcgtccagcacggtaaagccgttgtctttatcaaactcggtacgaataccaatctgcacggaatgattcgggtcgatcagaccttctttcggcgcggtatagaacatagtgccgtggtcaaattcacaaccgttcgcataggtatcggtgtgggcgtcaaagtgtaccagcgccattttgccgaaatgcttcgcatgagcacgcagcagcggcagcgtaacaaagtggtcaccaccgaaagagagcatacgcttaccggcagccagcagcttctcggcgtgcgcctgcagcttttcgctcatctcacgggcatcgccaaaggcatataccagatcgccgcagtccacgacgttcagacgctcacgcatgtcgaaattccacgggaagcggttgtgttcccaggccagattcgtgctaacctgacggatcgctgccggaccgtggcgaccacccgcacgaccagaagtggccatatcgaacggcacgccagtaatcacccagtctgcatcgctgtcatacggctggaagttcatcggcaggcgtaaaaaaccaaaggcattggaaaccagactgttatcgtattgatgacctaaggtgctcatggatggactcctattacaaagtcgatataaaaaaacccttccgcgtcgttaggcccgacgaggaagggttggatttgtcacaataaattgtggcggattatcaccgctaaattaagcggattcaagtaacacaggacttactcatcttcaagataagtataaccgtacaaacctgcctcgaactcttcaaggaactgttgttgcagttcagcatcaagatcggttttcttcacttgatcgcggaactgggttaacagcgttttcggatcgagctgtacatattgcagcatgtccgccacggtatcgccttcgtcagacagttctacttctacgctaccgtcagggaagacgaacacgtcaaccgcttcggtatcaccgaacaggttgtgcatgttgccgaggatctcctgatatgcgccgaccataaagaaaccgagcatcggcggattctctggatcgtactccggcattggcattgtcgtggcaataccgtcaccatcaatatagtggtcgatagcaccgtcagagtcacaggtaatatccagcagcacagcgcgacgttccggcacttgatccagcccttccagcggcagaaccgggaacaactggtcgatcccccatgcgtccggcatgctctggaacaggctgaagttgacgtacattttgtccgccatacgttcctgcagctcgtcgataatcggacgatgagcacggttttgcggatccagctgcttttgcacttcatggcacatgctcaaataaagctgctcagcccatgcacgttcttgcaggctaaagatgccggaagagtagccgatatgaatgtcgtgcagatccatctgactgtcgtgtaaccattcacgcagagaacggcgagttcccggttcgtgcatctcctgccaggtttcccacatgctttgcagcgcgcgcggcgcatcttctgcaggcgcggtcggcaccgtgtattcgttacgttccacgccgatgatattagacaccagcacggtgtgatgcgcagtcaccgcacgaccgctttcggtgattaccgtcggatgcggcagaccgttttcttcacacgcatcgccaatcgcccagataatgttgttggcgtattcattgaggccgtagttcacgctacagtcggactggctacgagtaccttcataatccacgcccagaccgccgccgacgtcgaagcactgaatattgacgcccagcttgtgcagttccacatagaaacgcgcggattcacgaacgcctgtcgcgatatcgcgaatattcgccatctggctaccgaggtggaagtgcagtagttgcaggctgtcgagacgcccggcttcacgcagggtttcaaccagttgcagtacctgagtcgcagccaggccgaacttgcttttttccccgccggaggactgccatttaccgctaccctggctagccagacgtgcacgcacgcccagacgaggaacgacattcagacgttctgcttcatccagcacaatggcgatttcactcatcttctcaatgaccagatagaccttgtgccccatcttctcgccaattaatgccaggcggatatattcgcggtctttataaccgttgcagacgatgacgctacgggtcatgccagcatgtgccagtactgccatcaactcggctttggaaccggcttccagacccagcggttcgccgctatgaatcagggactcaatcacgcggcggtgctggttaactttgatcggataaacaaggaagtaatcgccgttatagccgtaggattccctcgcacgtttgaacgcggcgttaatggaacgcaaacggtgctgcaggatctgtgggaaacagaacagtgcaggcagacgctggccctgtgcttcacgagttttcactaactgcgcgagatcgacgcgagcttccgggacgtccgggtccgggcacacgctaatgtggcccagctcgttaacgtcatagtagttattgccccaccaggcaatattgtaagtacgcagcatcttgctggcttcctgggagctcattgcaacctcctgcatggagcgtagtacaccgtgttcgcccgcactgctaggcaaacccatagacatgtcgtcagacatagcgaacctcaaattattttattaagtgtaaaacagttaacgactatcgcagcctggaactggcttaacaacccataagcacatggattttccagcagactatgctgacgctccaactgcgcaaccggtttctttttcataacattattaagcacataaccgaacgtaagtgtgaaagttcggcgaaaccacgagaaaactcttgtttttacaagagcgcccttgttcagtcctcagtaactgtaaccagctcttgaatcctgagaagcgccgagatgggtataacaagcgcaggtatgcaaagcagagatgcagagtgcggggaacgaatcttcaccagaacggtgagacaggttaagcagcagacaacggttcattatttcgtaagtcctccacggccgcctgttaagacgaacccacaagccaaaactctgattagtacccggctggaagtggcaacacgaaagaaacgtcgtgtgctttttatttaagccgcgcgccgcgttttataccccacaatggcagaaaattgcaaaagataaatacgcagaatgccggcattgtcaggaaaaatttccagccacgtttttaacagaatgagacagctttcaaaaaaaagtggaaatagggtgaagaattgacctaaaatagccatccagatgttaatccatccataccgattaacactcagactgccagtgtttttaacctgcagagtcgtggtaggatccgctaccacagaaaatccacacaacagtttgagctaaccaaattctctttaggtgatattaaatatggcaaaacacctttttacgtccgagtccgtctctgaagggcatcctgacaaaattgctgaccaaatttctgatgccgttttagacgcgatcctcgaacaggatccgaaagcacgcgttgcttgcgaaacctacgtaaaaaccggcatggttttagttggcggcgaaatcaccaccagcgcctgggtagacatcgaagagatcacccgtaacaccgttcgcgaaattggctatgtgcattccgacatgggctttgacgctaactcctgtgcggttctgagcgctatcggcaaacagtctcctgacatcaaccagggcgttgaccgtgccgatccgctggaacagggcgcgggtgaccagggtctgatgtttggctacgcaactaatgaaaccgacgtgctgatgccagcacctatcacctatgcacaccgtctggtacagcgtcaggctgaagtgcgtaaaaacggcactctgccgtggctgcgcccggacgcgaaaagccaggtgacttttcagtatgacgacggcaaaatcgttggtatcgatgctgtcgtgctttccactcagcactctgaagagatcgaccagaaaagcctgcaagaagcggtaatggaagagatcatcaagccaattctgcccgctgaatggctgacttctgccaccaaattcttcatcaacccgaccggtcgtttcgttatcggtggcccaatgggtgactgcggtctgactggtcgtaaaattatcgttgatacctacggcggcatggcgcgtcacggtggcggtgcattctctggtaaagatccaagtaaagtggaccgttccgcagcctacgcagcacgttatgtcgcgaaaaacatcgttgctgctggcctggccgatcgttgtgaaattcaggtttcctacgcaatcggcgtggctgaaccgacctccatcatggtagaaactttcggtactgagaaagtgccttctgaacaactgaccctgctggtacgtgagttcttcgacctgcgcccatacggtctgattcagatgctggatctgctgcacccgatctacaaagaaaccgcagcatacggtcactttggtcgtgaacatttcccgtgggaaaaaaccgacaaagcgcagctgctgcgcgatgctgccggtctgaagtaatctttcttcacctgcgttcaaaggccagcctcgcgctggcctttttcttttggataggcgttcacgccgcatccggcaaaaaaaccgcccgcacaataacatcattcttcctgatcacgtttcaccgcagattatcatcacaactgaaaccgattacaccaaccacaacagacaaagatttgtaatattttcatattattattcggttttcacagttgttacatttcttttcagtaaagtcttaattgcagataacagcgtttaatctatgatgatataactcaattattttcatgcacttaaatcataactaagataaatgttagtgtaagcgattacactgatgtgatttgcttcacatctttttacgtcgtactcacctatcttaattcacaataaaaaataaccatattggagggcatcatgcctgacgctaaaaaacaggggcggagtaacaaggcaatgacgtttttcgtctgcttccttgccgctctggcgggattactctttggcctggatatcggtgtaattgctggcgcactgccgtttattgcagatgaattccagattactagccacacgcaagaatgggtcgtaagctccatgatgttcggtgcggcagtcggtgcggtgggcagcggctggctctcctttaaactcgggcgcaaaaagagcctgatgatcggcgcaattttgtttgttgccggtagcctgttctctgcggctgcgccaaacgttgaagtactgattctttcccgcgttctactggggctggcggtgggtgtggcctcttataccgcaccgctgtacctctctgaaattgcgccggaaaaaattcgtggcagtatgatcagcatgtatcagttgatgatcactatcgggatcctcggtgcttatctttctgataccgccttcagctacaccggtgcatggcgctggatgctgggtgtgattatcatcccggcaattttgctgctgattggtgtcttcttcctgccagacagcccacgttggtttgccgccaaacgccgttttgttgatgccgaacgcgtgctgctacgcctgcgtgacaccagcgcggaagcgaaacgcgaactggatgaaatccgtgaaagtttgcaggttaaacagagtggctgggcgctgtttaaagagaacagcaacttccgccgcgcggtgttccttggcgtactgttgcaggtaatgcagcaattcaccgggatgaacgtcatcatgtattacgcgccgaaaatcttcgaactggcgggttataccaacactaccgagcaaatgtgggggaccgtgattgtcggcctgaccaacgtacttgccacctttatcgcaatcggccttgttgaccgctggggacgtaaaccaacgctaacgctgggcttcctggtgatggctgctggcatgggcgtactcggtacaatgatgcatatcggtattcactctccgagcgcgcagtatttcgccatcgccatgctgctgatgtttattgtcggttttgccatgagtgccggtccgctgatttgggtactgtgctccgaaattcagccgctgaaaggccgcgattttggcatcacctgctccactgccaccaactggattgccaacatgatcgttggcgcaacgttcctgaccatgctcaacacgctgggtaacgccaacaccttctgggtgtatgcggctctgaacgtactgtttatcctgctgacattgtggctggtaccggaaaccaaacacgttagcctggaacatattgaacgtaatctgatgaaaggtcgtaaactgcgcgaaataggcgctcacgattaatctccccaagcttcctcccatcgcggaggaagccacctcttgcagtcatcttttcttcgctctatcctctgccgctatgaaaacatcccgtctccctatcgccatccaacaggccgttatgcgtcgcctgcgggaaaaactcgcccaggccaacctgaagctagggcgtaactacccggagccaaaactctcttacacccagcgcggaacctccgccggaacggcctggctggaaagctatgaaattcgcctcaatcccgttttgctgttggaaaacagtgaagcttttattgaagaagtggtaccgcacgaactggcacatttgctggtatggaaacatttcggccgcgtagcgccacatggcaaagagtggaagtggatgatggaaaacgtgctgggtgttcccgcccgtcgtacgcatcagttcgaactgcaatccgtgcgtcgcaacaccttcccctaccgctgcaagtgccaggagcatcagcttaccgtacgccgccataatcgcgtagttcgtggcgaggccgtctatcgctgtgttcactgcggtgaacagctggttgcgaaataaccatctgaactatcaggaactttcctgatttggctgattgcataccaaaacagctttcgctacgttgctggctcgttttaacacggagaagtgcctacactagcgggattctttttgttaacccctaccccacgcgtacaaccgcgtggggagacgacgcggatttttaactatgcgtatcccccgcatttatcatcctgaaccactgaccagccattctcacatcgcgctttgcgaagatgccgccaaccatatcgggcgcgtactgcgcatggggccggggcaggcgttgcaattgtttgacggtagcaaccaggtctttgacgccgaaattaccagcgccggcaaaaaaagcgtggaagtgaaggtgctggaaggccagatcgacgatcgcgaatctccgctgcatattcacctcggtcaggtgatgagccgtggtgaaaaaatggaatttactatccagaaaagcatcgaactcggtgtaagcctcattacgccacttttttctgagcgctgcggcgttaaactggatagtgaacgtctgaacaagaagcttcagcagtggcagaagattgcaattgctgcctgtgagcagtgtggtcgtaaccgggtgccggaaatccgtccagcgatggatctggaagcctggtgtgcagagcaggatgaaggactgaaactgaatcttcacccgcgcgccagtaacagcatcaatacgttgccgttaccggttgaacgcgtccgcctgctgattggcccggaaggcggtttaagcgcagatgaaattgccatgactgcccgctatcaatttactgatatcctgttgggacctcgcgttttgcgtacagagacaactgcgctcaccgccattaccgcgctacaagtacgatttggcgatttgggctaacggagaagaataatgatcaagctcggcatcgtgatggaccccatcgcaaacatcaacatcaagaaagattccagttttgctatgttgctggaagcacagcgtcgtggttacgaacttcactatatggagatgggcgatctgtatctgatcaatggtgaagcccgcgcccatacccgcacgctgaacgtgaagcagaactacgaagagtggtttagcttcgtcggtgaacaggatctgccgctggccgatctcgatgtgatcctgatgcgtaaagacccgccgtttgataccgagtttatctacgcgacctatattctggaacgtgccgaagagaaagggacgctgatcgttaacaagccgcagagcctgcgcgactgtaacgagaaactgtttaccgcctggttctctgacttaacgccagaaacgctggttacgcgcaataaagcgcagctaaaagcgttctgggagaaacacagcgacatcattcttaagccgctggacggtatgggcggcgcgagcattttccgcgtgaaagaaggcgatccaaacctcggcgtgattgccgaaaccctgactgagcatggcactcgctactgcatggcgcaaaattacctgccagccattaaagatggcgacaaacgcgtgctggtggtggatggcgagccggtaccgtactgcctggcgcgtattccgcaggggggcgaaacccgtggcaatctggctgccggtggtcgcggtgaacctcgtccgctgacggaaagtgactggaaaatcgcccgtcagatcgggccgacgctgaaagaaaaagggctgatttttgttggtctggatatcatcggcgaccgtctgactgaaattaacgtcaccagcccaacctgtattcgtgagattgaagcagagtttccggtgagcatcaccggaatgttaatggatgccatcgaagcacgtttacagcagcagtaacccaccttagcgagaaggatctcgttgagactctgagtgacagcgcccttctttccacgcatactgggcgctgttgcttttttgaaccaggaaacagaacctctgacaatgaatttacagcatcactttcttattgccatgcctgctctccaggatccgattttccgtcgttccgtggtctacatttgcgaacataataccaatggtgcaatggggatcatcgtcaacaagccgctggaaaatctcaaaattgaagggattctggaaaagctgaagatcacgccggagccgcgtgatgaaagtatccgtctggataaaccggttatgctcggcggtccgctggctgaagatcgcgggtttattttgcatactccgccctccaattttgcttccagcattcgcattagtgacaacacggtaatgaccacttcccgcgatgtgctggaaacgctcggcaccgataaacaaccgtctgacgtattggtggctctgggttatgcctcctgggagaaaggtcaactggaacaagaaattctcgataacgcgtggctaacggccccggcagatctgaatattctgttcaaaacgccgattgccgaccgctggcgcgaggcggcaaaactgattggtgtggatattctcaccatgcctggtgtggcaggacacgcctgatgagtggaaccttactcgccttcgacttcggcaccaaaagcattggcgtagcggtcggccaacgcattaccggcaccgctcgccctttgcctgcaattaaagcacaggacggtacgccggactggaacattatcgagcgtttactgaaagagtggcagccggacgaaatcatcgtcggtttgccgctgaatatggacggcaccgagcaaccattgactgccagagcgcgtaaatttgccaaccgtattcatggccgtttcggtgttgaagtaaagctccatgacgagcgtcttagcactgtggaagcccgttccggtctgtttgaacagggcggctatcgggcgctcaacaaaggcaaagttgactctgcctctgcggttattattctcgaaagctatttcgagcagggatattaaggcgatttaaacgcctggcggagtgtaaataatatcatcgcgtcttattgccggatgcggcgtgaacaccttatccagcacacatctggcagcggctataggtctgataagacgcgttagcgtcgcatcagacatttattgcctttgtaggcccgataagcttgcgcatcgggcatggcaacgtcacaaacgcccttcccccacccggtgctgataactctgctgaaacgttatcatccccacctgctgcccggtttgaataacatgcggtaactggtgggttttcccttcgcgaatcaaattccccaccgcgggtgtgttaatcagcaattcaaatagcgccacgcgtccttcctgtttatccacttccagcttttgactcagcactgcccgtaaactacctgccagttgattacgcacggggtctttttcctgcgccggaaaactatccaccagtcgctcaactgcctgcgcggcaccacgcgtatgtaatgttgccagcaccaaatgcccggtttctgccgccgtcagtgccagacggattgtctcgctgtcacgcagctctccgagcaaaatcacatcaggatcttcccgcaatgcggcccgcaatccgcttgcgaacgtcatacagtgcaaaccaatttcccgctgctggatcaaacatcgctggctggcatagagatattcaacaggatcttccagcgtcagaatatgcgcatcggcatgttgattgagatagccaaccatcgccgccagcgtggtagatttgccactccccgtcgcccccgtcaccagaatcaggccattctcgctcttgagtaattccggcaataccgttggtgcgccaagctgttcgagctgcgggcagtggctaggtaacagccgtaacgccaggctaatgccatgccgttgcgcgaatgcgctgccacgcaatcgctggttttccgccaggctcacggcaaaatccagctgaccattctccagcaatattgcccgctgatcgtcatccagccactcccgcagtagctcttcgacgtccggcgtatcaaacggcgcagcttccattctgccgcgaatgcgccatcgtgcgggccaggcgctgcacaggtgtagatcgctgacgttatgctttacactaagggccacaatttcttccatattcatactaagatcctcggaaaatgaacgatattgcgcataacctggcacaggtccgggacaaaatcagtgcggctgcaacgcgttgcggccgttctccagaagaaattacgctgcttgcagtcagtaaaacaaaacctgcgagcgccatcgcagaagccattgatgccgggcagcgtcaatttggtgaaaactacgttcaggaaggggtagataaaattcgccactttcaggaactgggcgtaacaggattagaatggcattttattggcccgttgcagtctaataaaagccgcctggtggcagagcatttcgactggtgtcataccatcgaccgtttgcgcatcgctacccgtctcaacgaccagcgcccggcagaacttccccctcttaacgttctgattcaaattaacattagtgatgaaaacagtaagtccgggattcaactggctgaactggacgagctggcagctgcggtcgctgaactaccgcgtttacgtctgcgcgggttgatggcaatccctgcgcctgagagtgaatatgtaaggcagtttgaagttgcacgccaaatggctgtagcatttgccggactgaaaacgcgctacccgcatatcgacacgctctctctgggaatgagcgacgatatggaagccgccattgcggcaggtagcacgatggttcgtatcggcactgcaatttttggtgcgcgtgattactctaaaaaataaggaattaaaggaacgccatgaatacgttgactttcctgcttagtacggtcattgagctgtataccatggtgctgttattacgcatctggatgcagtgggctcattgtgatttttacaaccccttcagtcagtttgtagtgaaggtaacgcagccaattatcgggccactgcgccgcgttattccggcaatggggccaattgacagcgccagcctgctggttgcctatattctcagttttatcaaagccatcgtgctgtttaaagtggtgaccttcctgccaatcatctggattgccggtttactgattctgctgaaaaccatcggcctgctgattttctgggtcctgctggtgatggcgattatgagctgggtaagccaggggcgtagcccgattgaatacgtgctgattcagctggccgatccgctgctgcgcccgattcgccgcctgctaccggcaatgggtgggattgatttcagcccgatgatcctcgttctgctgctgtatgtcatcaatatgggtgtcgcagaagtattacaggcaaccggaaatatgctgctgccagggctgtggatggcgttatgaatgccgtaacagttaatgatgacggtctggttttacggctctatattcagccgaaagccagccgtgattctattgtcggtttacatggcgacgaagttaaagtcgccattaccgcgccgccggttgacggccaggccaacagtcatctggtgaagtttctcggtaagcaattccgggttgccaaaagccaggtggtgattgaaaaaggcgaacttggccgccacaaacaaattaaaatcattaatccgcaacaaatcccgccagaaatcgcggcgttaattaattaagtatcctatgcaaaaagttgtcctcgcaaccggcaatgtcggtaaagtgcgtgagctggcgagcctgcttagcgacttcggtcttgatatcgtggcccaaacagacctcggcgttgattccgctgaagaaaccggcctgacctttatcgaaaacgcgattctgaaagcgcgccatgcggcaaaagtgaccgctttaccggcaattgccgacgactctggtctggcggtagatgtgcttggcggcgcgccgggcatttactccgcgcgttattccggtgaagacgcgaccgatcaaaagaatctgcaaaaactgctggaaacaatgaaagacgtaccggacgaccaacgtcaggcgcgtttccactgcgtgctggtatatctgcgtcacgcggaagatcccactccgctggtatgccacggtagctggccgggcgtgattactcgtgaaccagcgggcactggtggctttggttatgatccaatcttcttcgtaccttccgaagggaaaaccgccgccgaactgacccgcgaagaaaagagcgccatttcccaccgtggtcaggcgttgaaactgctgctggacgctttacgtaatggttaaattacctccgctgagtctctacattcacatcccgtggtgcgtgcagaaatgcccgtactgcgatttcaactctcacgcgttgaaaggagaagtgccgcacgacgattatgttcagcatctgcttaacgatctggacaacgatgtggcttacgctcagggccgtgaagtaaagacaatctttattggcggtggtacgccgagcctgctttccggcccggcgatgcaaacgctgctggacggcgtgcgtgcgcgtttgccgctggcagcggatgcagaaattactatggaagcgaaccctggcacggtagaagccgatcgctttgtcgattatcagcgtgctggtgtgaaccgcatctctattggtgtgcagagttttagcgaagaaaagctgaaacgacttgggcgtattcatggcccgcaagaagcgaaacgcgcggcgaagctggcgagcggtttagggttacgtagctttaaccttgatttgatgcatgggctgccggatcaaagtctggaagaggcgcttggcgatctacgccaggccattgaactgaatccgccgcatctttcctggtatcaactgaccatcgaacccaatacgctgtttggtagccgaccaccggtgctgccggacgatgacgcgttgtgggatatattcgaacaggggcatcagttattaaccgcagcgggttatcagcaatatgaaacttccgcttacgccaaacccggttatcagtgccagcacaatctcaactactggcgctttggtgactacatcggtattggctgcggcgcacacggcaaagtgaccttcccggatgggcgcattctgcgtaccaccaaaacgcgtcatccgcgtggttttatgcaaggaaggtatctggaaagccagcgtgatgtcgaagccacagataagccgtttgagttctttatgaatcgcttccgtctgctggaggccgcgccgcgcgtggagtttattgcgtataccgggctttgcgaagatgtgattcgcccacagttagacgaggcgattgcccagggttatctcaccgaatgtgcggattactggcagataacggaacatgggaagctgtttttaaatagcctgctggagctttttctggctgagtaaacttgtattgccggatgcggcgtgaacgccttatccagccgacatgtggcagcggttgtaggtctgataagacgcgcaagcgtcgcatcagacgttgattgccggatgcggggtcaacgccgcatcctgctacaaatcgtgcactatatcaaacttacttaatcaccccattgcgccgcagttgttcggtatcttttttccagcgttcattagcttggttgatatcgtcaattttcatcaaaatcgcgacttttttactgtttatttcactaactttcatcgttaacggatattgccctttttcgagcgttacccagtcatcctgcaatttacggctaagtttttgactttgcagaaaagtctgtcgccgttgttcgttgatatcgaaatctcgtttctgctgaatcggcacttcataacactcttcactctgtttatgacatgccgcaatcgccggttgataaacctctttgtcatatttaaccgcgaacgcctcgctatcgttctgtttattaaactcatcacgctgttggtgaatttttttaaaggcgtcttcgcgggtcatttgcttaccgtttgcatcttttccccaatatgcatccgctgctttctgcgccgccaccatttgcttatcaagcgctttcacttccttttccagcgcaggaatgctgttcttctgggtattcaacgcagattcaagctgactaaagcgataattgaaatcttcgctattcacgatcagatatttattattcgttttgatatcgtcgaccacccgcccacgatcgctggctgccgcctgaaaagagtaaaagttcacgctccagccagacgcgggcgttcctttactggttaacatcgcgctgaattttaccggtttatctttcgtccaggtctgttcgagcagttcgtaatctgccaactgaccgacccaggtatagagatcgtcactggaagagacatcgccttccgcactccaggtggcctgattacccttagcatcaagattttttaaggtgatagcatcaagcttgagaatgccgtgatactgctttttgaattgatcttttaagatattttcagttggcggttcgccatctgcccaggcattaccagtcatcaacataagcagtgccgtgccaacaatccattgctttttcacccgaaaaacctcacgcggaataatttattccggtgattatcattagggtaattaaaattggcaatggacgtgagtctgaagtgaaaaagccccggcacgataccggggcgaggcgattagtactgattgaagatctgctggatctgctgcggatctttggtttgcgtcagagccagttgcagcagaacgcgcgctttttgcgggttcagcgtgccagaggcgacgaagccgtatttcgcatcatccacttcggcatcctgagtggtagcgcccgtcggtacgcgggaagaacgcacgactgcagtaccggttttcgcggcggtcgccagcgtgtcgaacacagatttatacaggttgccgttacccacaccagcgctaacgatgccatcatagcccgcatctaccagtgctttagccggaagatcggatgcgttagcgtagttataaacaatgccgactttcggcagttcattcagcttagagacatcgaatggcgtgtcgctggtatgcttacgtgccggggtacgctggtagtcaatcttaccgttgtgaatgtaacccagaggaccgtagttaacagacttgaaggtcgctacgtcggtggtgttggttttggtgacgtcacggccatcaagcacggtgtcattcatcactaccagcacgccacggttggcggaggctttatcagctgcggtcactaccgcgttatacaggttgaatggaccgtctgcgctcatagacgtggacggacgcattgcgccgaccatcaccaccggtttgtcgcatttcaccgtcaggtcgaggaagtaagcagtttcttccatcgtgtcggtaccgtgggtaatgacgaagccgtcggtcttatcgcagtcggtgttaatttttttcgccagtgtcagccagacattatcgttcatgtcctgggagccgatattcactacctgctcgcctttaacgttcgcaatgtcttttagttgcggcaccgcattaaccagattttctacgccaactttacccactgtgtagttagatttggttgcggagtcaccaccaccggcaatggtcccgccggttgctaaaatggtgatattgggtaatgccaatgctgcaccactaaaacccataaccagtgcggcaagtgccgtctttttgaaaaactccatttcattcctccagttacgtgaacgctacgcattatcccttagctctgtatgggaaatttgacgttaaacaatttacaacgtgaatatattttggagatctacaaagttagaggcaggtaacaaaacgaagaattaaacggcataaaaaagtattatgccgtcttaaaatagaggattattttaaattcccgaccagggctttgcggctatcttccagagtcacaacgcggctacaaacatctttgccaaactgctggaaatctttttcctgctttttccactcggtttggatactggattgcagcccccccaggcttcccagcacattctgtaatgggttaccgccgctttttcagcaccgctttcgcgcccatttcattaatgctgtcctgtaaaattccacccattgcctgattcactaattgctggccttcggcgcgaacctgatcaatggctttatagtgaaacgtcaggccatcgctgcgcgtttcaataatgcggttcatctgctctttcagctgcgcatcaagtttggtcagacggctgcgcattttgctgctttcgcccatctcctgaacgataattttatccagagcaatacgggctttctcgacgcggcttttcgcgccttcatcaatccacggcagcgtgctgcgtagttcagcctgataatccttcgcctgctcgcgctgggcggcattcagggaatattgcttaccgttatacatcacgttgccgtctggcgtgatcaccagattgccgttttcgcccttcacctgcacggtttgcgggctgacaatcacatcgtcacgcggcgtgacgctgcactggtagtcggcgtgagcggtcattgccgtcacactaagtgctgccgccagcagcattttgcgcatcatagtcttccctcaagaaaaaatcaggccagcatttgctggccccagattgataacaaagtacgcgttttccatgccggatgcggcgtaaacaccttatcccgcctactcgatcgtgcatctttccaggcctgataagcgtagcgcatcaggcagttttgcatttgtcatcgcccgtatgctttcttagtcccaccaaacgtcgaaaagttcgctggtgcgtacctcatccagtttgcgctcttccagccacttacgcacaatcgcctgatgttcttcggtgcatttgccgatttcctgcatgcagatcagaccttcccaggccagataaccgctgccgtcaaaggccagtttgttcggttcgataacctcgttaataaaatcatcaacggttttatcaatctgttcttcgcttgtaccttccgggaatcgccatgccacgctaaatcctaattcctggaattcgtcgatgtgcatttttttacgcagacgacggctacggttctttgccattatttcaccctctcgaacattaagtcccatactccgtgaccaagacgatgaccacgttgttcaaatttcgtcaccggacgacttgccggacgcggtacgtaatcattgctctcactcaggtttttataaccgtcaatagaagacatcacttcaagcatatgttccgcataaggttcccagtcggtcgccatatggaatacgccccccagctgcagtttgctttttaccagttcggcaaacggcacctgaacgatacggcgtttattatggcgcgctttgtgccacgggtcagggaaaaagagctgcaccatgcgcaaactattgtcaggaatcattttatgcagcacttcaaccgcatcgtgacacatcacgcgcaggttgcttaaaccttcttcatgcgcagaagccaggcacgcaccaacgcccggactatgcacttcaatgccgaggaagtcctgctcagggcgatctttagccattgccaccaggctcgcccccatgccaaaaccaatctcaagcgtcaccggcgcttcacggccaaaaagcgcggggaaatccagcatatcttcgctgaactcaacgcccatcaccggccagtagttttccagcgcatgttcctggcctttggtcagtcgcccctggcggcgcacaaaactacggatacggcgcagtgggcggccgttttcatcaaattccggactaatgacgtcgtttttcataaaggtttagtcgcttgtgaaagtgttctgaaaacgggcattatccaaagttagttgccggatgcaagcatgataaggccgtggctgcggaaagttccggtttacaccctgccgtcgctgtgctgcaatcttgcccccaacaacagtgaattcggtgaccatgcaagcgagccaatttagtgcccaggttctggactggtacgataaatacgggcgaaaaactctgccctggcaaattgacaagacgccctacaaagtatggctcagtgaagtgatgttgcaacaaactcaggttgcgaccgttatcccctattttgaacgctttatggcgcgcttcccgacggtgaccgatctcgccaatgcgccgctcgacgaagttctccacttgtggaccgggcttggctattacgcccgcgcgcgcaatctgcataaagcggcacaacaagtggcgaccttacacggcggtaaattcccggaaacctttgaggaagttgcagcactgccgggcgtcgggcgttccaccgcaggcgcgattctcagcctttctctgggtaagcactttccgattctcgacggtaacgtcaaacgcgtgctggcgcgctgctatgctgtaagcggctggcctgggaaaaaagaggtcgagaataaattatggagtttgagcgagcaggtgacgcccgcggttggcgtggaacggtttaatcaggcgatgatggatttgggtgcgatgatttgtacgcgcagcaaaccgaaatgtagcctctgtccgctacaaaacggatgtattgccgccgccaacaatagctgggcgctttatccgggcaaaaaaccgaaacagacgctgccggagcgcaccggctactttttgctattacagcacgaagatgaagtattgctggcgcagcgtccgccgagcggattgtggggcggtttatactgtttcccgcagtttgccgacgaagaaagtttgcggcagtggctggcgcaacggcagattgctgccgataacctgacgcaactgaccgcgtttcggcataccttcagccatttccacttagatattgtgcctatgtggcttcccgtgagcagtttcaccggctgcatggatgaaggcaatgcgctctggtataacttagcgcaaccgccgagtgttggcctagcggctcccgtggagcgtttgttacagcagttacgcactggcgcgccggtttaacgcgtgagtcgataaagaggatgatttatgagcagaacgattttttgtactttcctgcaacgtgaagcagaaggtcaggattttcagctgtaccccggcgagctgggaaaacgcatctataacgagatctccaaagaagcctgggcgcagtggcagcacaagcaaaccatgctgattaatgaaaagaaactcaacatgatgaatgccgagcaccgcaagctgcttgagcaggagatggtcaacttcctgttcgagggtaaagaggtgcatatcgagggctatacgccggaagataaaaaataaaaacagtgccggagcacgcctccggcaacttgcataaaaacaaacacaacacgcacccggaatgatgaaaaaatatctcgcgctggctttgattgcgccgttgctcatctcctgtagcacgaccaaaaaaggcgatacctataacgaagcctgggtcaaagataccaacggttttgatattctgatggggcaatttgcccacaatattgagaacatctggggcttcaaagaggtggtgatcgctggtcctaaggactacgtgaaatacaccgatcaatatcagacccgcagccacatcaacttcgatgacggtacgattactatcgaaaccatcgccgggacagaacctgccgcgcatttgcgccgggcaattatcaaaacgttattgatgggtgacgatccgagtagcgtcgatctctattccgacgttgatgatattacgattagcaaagaacctttcctttacggtcaggtggtggacaacaccgggcagccgattcgctgggaaggtcgcgcaagcaacttcgcggattatctgctgaaaaaccgtctgaagagccgcagcaacgggctgcgtatcatctacagcgtcaccattaacatggtgccgaaccaccttgataaacgtgcgcacaaatatctcggcatggtccgccaggcgagtcggaaatatggcgttgatgagagcctgattctggcaattatgcagaccgaatcttcctttaacccgtatgcggtcagccgttccgatgcgctgggattaatgcaggtggtacaacatactgccgggaaagatgtgttccgcagccaggggaaatccggcacgccgagccgcagtttcttgtttgatcctgccagcaatattgataccggcaccgcgtatctggcgatgctgaacaatgtttatctcggcggaattgataacccaacaagccggcgttatgccgtcatcaccgcctataacggcggcgcaggcagcgtgctgcgagtctttagcaatgataagattcaggctgccaatattattaacaccatgacgccgggcgatgtttatcagacgctgacgacccgccatccctctgcggaatctcgccgttatctttataaagtgaataccgcgcaaaaatcctaccgccgccgataattccattaaccgcccctgacgatgctcaggggcaaaaatgttatccacatcacaatttcgttttgcaaattgggaatgtttgcaattatttgccacaggtaacaaaaaaccagtccgcgaagttgatagaatcccatcatctcgcacggtcaaatgtgctttttcaaacactcatccgcatcacgatgtgaggaaattaacatgaatcttaagctgcagctgaaaatcctctcttttctgcagttctgtctgtggggaagttggctgacgaccctcggctcctatatgtttgttaccctgaagtttgacggtgcttctattggcgcagtttatagcagtctgggtatcgcagcggtctttatgcctgcgctgctggggattgtggccgacaaatggttaagtgcgaaatgggtatatgccatttgccacaccattggcgctatcacgctgttcatggcggcacaggtcacgacaccggaagcgatgttccttgtgatattgattaacagctttgcttatatgccaacgcttgggttaatcaacaccatctcttactatcgcctgcaaaatgccgggatggatatcgttactgacttcccgccaatccgtatctggggcaccatcggctttatcatggcaatgtgggtggtgagcctgtctggcttcgaattaagccacatgcagctgtatattggcgcagcactttccgccattctggttctgtttaccctgactctgccgcatattccggttgctaaacagcaagcgaatcagagctggacaaccctgctgggcctcgatgcattcgcgctgtttaaaaacaagcgtatggcaatcttctttatcttcagtatgctgctgggcgcggaactgcagattaccaacatgttcggtaataccttcctgcacagcttcgacaaagatccgatgtttgccagcagctttattgtgcagcatgcgagtatcatcatgagcattagccagatctctgaaaccctgttcattctgaccatcccgttcttcttaagccgctacggtattaagaacgtaatgatgatcagtattgtggcgtggatcctgcgttttgcgctgtttgcttacggcgacccgactccgttcggtactgtactgctggtactgagcatgatcgtttacggttgcgcattcgacttcttcaacatctctggtagcgtgtttgtcgaaaaagaagttagcccggcaattcgcgccagtgcacaagggatgttcctgatgatgactaacggcttcggctgtatcctcggcggcatcgtgagcggtaaagttgttgagatgtacacccaaaacggcattaccgactggcagaccgtatggttgattttcgctggttactccgtggttctggccttcgcgttcatggcgatgttcaaatataaacacgttcgtgtcccgacaggcacacagacggttagccactaattacgcaaagaaaaacgggtcgccagaaggtgacccgttttttttattcttacttcaacacataaccgtacaaccgtttcacgccatccgcatcggtttcgctataaacaccttgcagctccgggctaaatcccggcaacaaattcaccccttcttccagtgcaaggaaataacgttgaaccgccccaccccagacttccccgggtaccacgcaaagcacgccaggtggataaggcaacgccccttctgccgcaattcgcccttcggcatcacgaatccgcaccaactccacgtcaccgcgaatataagcgctatgcgcatcctgggggttcatcaccacactcgggaaactctgctggcggaacatcgctttttgtaggtctttgacgtcgaaactgacatacagatcgtgcatctcctgacacaactggcgcagggtgtagtcgcgatagcgcaccggatacttgttataaacgctcggcaacacctcaaccagcgggctgtcatcctcaatatgctgttcaaattgcgccagcatcgccaccagttgtgccagcttctcgtggctttccgccggagttaataaaaacagaatggagttgagatcgcacttctccggcacaatgccgttctcacgcagatagtgcgccagaatcgtcgccggaacgccaaagtcgctatattcgccggtttcggcatcgatacctggtgtagtgagtaacagcttgcacggatcaacaaaatactgatccgcggcatatccttcaaagccgtgccacttcgcccccggctcaaaactgaaaaaacggcggtcgctggctaacacacttgtcggataatcctgccacaatttgccatcaacaacgggcgggataaacgggcggaacagcttacagcgcgcaagaatagccttgcgcgcttcaatccctatctcaacacactcagcccacagccgacgcccactctccccttcatgaattttggcgttaacatccagtgcagcaaacagcggatagaaagggctggtagaagcatggagcataaaggcgttattcaaccgcttatgcgggcaaaaacgcgcctgtccgcggatatggttatcttttttatggatctggctcgtctgactgaatcccgcctgctgtttgtgcacgctctgagtcacaaagatccccggatcgttttcgttaagttctaacagcagcgggctgctatccgccatcatcgggataaattgttcataaccgacccacgcggaatcaaacagaatgtaatcacacagatgcccaacggtatcgatcacctgacgggcgttatagacagtgccgtcataggttcccagctgaataatcgccaggcgatacgggcgcggcaggtcggctttttctggcgcaacgtcgcgaatttgctggcgcagatactcttcattaaaacagtgcgcatcaataccgccaatgaaaccaaacgggttgcgactagcttccagatagaccggcgtcgcccccgcctgaatcagcgcgccgtgatgattgctcttatggttgttacggtcgaagagcaccagatcgccacgcgttaacagcgcattcgtcaccactttattcgctgcgcttgtgccgttcagcacaaaataggttttatcggcatgaaagactttggctgcgaatttctgcgcatctttcgcgcttccttcatgaataagcagatcgcccaattttacgtcagcgttacacatatcggcgcgaaagacgttctcaccaaagaaatcgtaaaaatggcgtccggcaggatgctttttaaaaaacgcaccatgttgatgtccagggcaagcaaaggtgctgttgcccatctcaacgtactgcgtcagcgtgtcataaaacggtggcagcaaattctcttcatactgacaggctgcggattccagctccagccactgctgctcgttgccgttgattaccgccgtaacgcccgcaggtaattcaacagcatgttcggaatacaaaaacaccggtagatgaaaaccggtgcgcttaagcaacgcaagaatgccactgcgactatccgcagcggtaatgacgactgccgcgacgtccgtaaaatcagtatctcccaacgccaccacgcgacgatgagaagaaagtcgggataccagttcactactggcggcaatattcatacttttcataagcgcaaacccgtttcggggaagtaagaataccggacaaggtggaaaaccctgccccatgagatatgggtcaaactggtcaccagctccgaccgccagacatcagtaaaagcagaaacgctctgattttactgttgtcctgcagtgagcgtgcgttaacttcaccgcatgagcagtaacatagaaagggaaacgtttcgcgcgaaacggcgataagcgagagaatgtaaggagatggcgtgcatcgggcaaactccgtacagagaggagaaaattcgcgcaatcatggcacctttcgctaaagcgtgcaagccaggactttgcgaacaaacaagccatcgacggcaccaaacggtcataataagaaaatcaaacaatacagctaacaggaactcttgtggtcatcggcccttttatcaacgctagtgcagtcttactgggtggcgttctcggcgcactgctcagccaacgcttaccggaacgtatccgcgtctccatgacaagtatttttggtctggcaagcctggggattggtattttactggtggtgaaatgtgccaaccttccagcgatggttttagctacgctacttggcgctctaattggcgaaatttgtttgctggagaaaggtgtcaatacagcagtcgccaaagcacaaaatctgtttcgtcacagtcgtaagaagccagcgcatgaatcttttattcagaattatgtcgcgattattgtcctgttttgcgccagcggcaccgggatcttcggggcgatgaacgaagggatgaccggcgatccgagtattttaatcgccaagagttttcttgatttctttacggcgatgatcttcgcctgcagcctgggtattgcggtaagcgtgattagtatcccattactgatcatccagttaacgctggcgtgggctgccgcgctgattttaccgctgaccacaccgagcatgatggcagacttcagcgccgtaggcggtttattgctgctggcaaccggattacgcatctgtggcattaaaatgttcccggtggtcaacatgcttccagcactccttctggcaatgccgctttccgccgcctggaccgcctggtttgcctgacaatgcgtgcaatatcggcaaagtgatgatagattgtgcagtctgcagtaaattgaagaaatttgattgacgagacgaggcgaatcaggtttaatgcgccccgttgcccggatagctcagtcggtagagcaggggattgaaaatccccgtgtccttggttcgattccgagtccgggcaccactaattcttaagaacccgcccacaaggcgggtttttgcttttggatctgacaataaccttcacgaaaaaaattagcttataaagtctgggggaattactctcgccacgttaacgagagtaattttattgatattaatctcctgatactttacccccgtccaaactccagccgctgcacattcaccatcccaggcttctcagcagcactgacatcaatttgtgtcacccgcagcgcatagaacgccattttgaatttacgaacggacgcattatcagtgactttaacggcatgggcaaagtgaaatatcattttttaacgataaaaagagtgttatttcttgtgtatcagacaataagcattcattcaaaacctttagaaataatcaaaacacaggtattccactggttaatatattcacatatgaaatgaataaatattggaatatataaatattgaatattttgattaatccccgtactgattattcttcataatcagtacggggttgctacaacatgtattactttttcaccacaattaacggttcaatatcactctcttttttgatgaccagactttcatcaccgcgcaaacacgtcccaccgtagttgccgccaacggtgaaggtacatacctgaatgtatttaccgtccactttcggcaaacaccacagttgctgatagatgtttttctgctcggcaaatttaccgctggttttgtccagcacctcttcatgatggctgacgaggtcgatattgctgccacagcgaccggcgatcggtttcactgcgtaacctgttttcaccagttcatcattaacagtgaaatcggtatccagcaggtaacgatggtgcgggaacaggctccagaggatcggcagaatcgctttgttgccggggatcaccgtccacagcggctcaaagaccagcacttccgggcgcagcaatacgtcgataagacgcacttcgttttgcggatgaccggtacggattggcaccgcagcaaactcacggtcgctaacttcacgaatctgatcaaacgcggtttcccacgcccaggttttccacacgcagttaaccagtcgcccttccccatcaatcagttgcccggcagcatcccagcccagttcatccaatccacgcaagatacgcgtttcaaagcccgcctggtgcagcgcctgctccataaactgcgcgtgatagttttcctcgatatctttgtcctgcatgatatggacaaacggacgtgcacgactgtgtttccaggcaccagccaattcgttaatcagcccttccgccggattgaagccgttgcctttatagccctgctccgcccaacgttcgaggatcaagcccgcttcggtatgacaggaggcggagtcggcgttgtactcgtaaaccttcaggccacgctcatccatgcagaaatccatacgaccagtgatcatatggtgacggcgacgctgccaggagagacgcaaacgtggccagaggattttcgggatgtcgaacagcgccagcaggttgtcatctttcagcaccttgtcggttgcgtgaagatacatcaggtgcagctcgttggtggctttaattagctcctgctcggcactctcggtaatggtgtagtaatgataaggatcctgattgatcacctgaccgttggcctgcacataggcgttttgcagcggatctttttcatccagccatttaccgtcaaactggcctttgttttccaggcgcgctccgctgattttcagcagctcgcctgcaatttccggctgcggtaagctgtattcagtatcttccgtctggatcatccagcccagaatggtggtgtcatcaaaagtgtctttcagggtatagcagccgttttcgaccaccatctccagctcgcgcgtccactgttgcccttgcggcaacggggaatgaatcacgttctgttccgcaatacggactttgttgccatgcaattgggtaatgatggcgacatggccagtgtctttaaattcaccgcctttatcccagataagaagcgcacccgcgaccggcgcacgcgggctgccgttaggaaatgcctgcaatggcaggatgttgtcattaaccacttctcgcaggaagcgcaggctgaaaatctcccacgccatacccacgtcagtaaagaccacaccgtaattcagaaagagaaaacggcgagcaaattcaacgcattgccacttgtggcccatatattcgtcgtcgatatagctacggaatacggcgtcatcttcgtattcctgcggatcgagagaactgtaatcactagagtagattgctaccccacctggggcgtagcccaataatgtcccgaacggggcatcctggctggtcgttcctttgctcatcactttacctttaacaatacaacctaagcagttggcgtaattgttgtgctctgattacctgctcagcgacattaaccggacagaggtcagactaatcatacacctcatcgcagcggctggcgcaaagggttaaaaaattcacattctgtacagcaagtgacctgctacactgcttcaacactaccactcagaaggcaactcactatgacagacaatacttatcagcccgcgaaagtctggacgtgggataaatccgctggcggcgcgttcgccaatatcaatcgcccggtttctggtccgacgcatgaaaaaacgctgcccgttggcaaacacccattgcaactttatagcctgggaacgccgaacggtcagaaagtaacgattatgcttgaggagctgctggcgctgggcgttactggtgcagagtacgacgcctggctgattcgtattggcgatggcgatcaattctccagcggctttgtcgaagtgaacccaaacagcaagatcccggcgctgcgcgatcatacgcataatccgccgatccgcgtgtttgaatctggtagcatcctgctttatctggcggagaaatttggctacttcctgccgcaggatttggcaaagcgtactgaaacgatgaactggctgttctggttacagggcgcggcaccgttcctcggcggtggttttggtcacttttaccattacgcaccggtaaagattgagtacgccatcaaccgctttaccatggaagccaaacgtctgctcgacgtgctggataagcaactggcgcagcataagtttgttgcgggcgatgagtacaccattgcggatatggcgatttggccgtggtttggcaacgtggtgttaggtggtgtgtatgatgccgctgagtttcttgatgcgggcagttataagcatgtacaacgctgggcgaaagaagtaggcgaacgtccggcggtgaaacgtgggcgtattgttaaccgcaccaacggaccgctgaatgagcagttgcatgagcgccatgacgccagtgatttcgagacgaatacggaagataagcgtcaggggtaagggttggtgttcgtcgcagcaagccatccaggccggataaggcgttcacgccgcatccggcaatcgtgcacaatgcctgatgcgacgctgccgcgtcttatcaggcctacgaaagctaatcatcacgcgctggtaatgtcgtaatccatttggcgcagtgcgtctaatgtggctttggcttcatcttcgtcgatgatgctcatggcaaatccgacgtgtaccagcacccactggcccagtagatcggcagggttaccttcacaaatcagggcgatattcacatcgcgcttgataccacatacttcaacctgcgcaagctggtgaatatcttcaccgacagccagcacctggcctggaacgccaatacacattattaactccggttattcaacttcaatacttttgacgatcaggctatcgccggtatcgacacgcaaccgctcgccgtgacagagcggacactgcgcatcgtgctgatgaatctccaccacctggctgcaatcccagcaccaagcctgggcgggtttatagacgatatgtaaatcgcacccttgcgccaccgttccgtggcagacaatttcaaaactaaaacggacggcgctctcctcaacgcaggagagcgcgccaatttccagccacacggcggtgacgcgcttaacatcgtgctgctccgcctgccgttggataatttcaacggcgctctggcaaagagacaactcatgcattttcgccactcctgcgaccaaacagcagggcgcgacgccctgcgtgtggtacatccggattcgtgactggcaggctaaggatcattcgtgcgcagtcatccgtcaggcgttggccctcttcaatgctcatgctgtggctaagcgggctcatcaggctacaggagagatattggctaacaccgtccagttcgccaacggtaaaggtcatagtgccatacggcagttgcagaccaattttttcactcactttgcgcagcggccagagttgatccgggccggggaagataactgcactcagcatccacggggtgatcacacaccccgtccactgaccttcgaacagcgtaaaatcagaaacatacaccggcatactaggatgcagaaaagagagatcgtgcatgctacgccgggcaatttcttcaaacgctgcctgtacttgcgccttcggggaggtctggaaacctgctatctcttcagtcatgaatcgcctcccgtgggatggcttccacgccagattcacgcagcgcagccagaacctgctcaagcgcaggttcaatcattgcttcaaccgtcggcgttaagccgatgtgtggctccaggctttccgggatcacgccgaccagggtcagctttttcggaaactcgccggtgaagcgcagggcgctcaagacgtcggccaggccaagctgatgcggagagattttgttggtaaacaacgccggaacttcttcatcccgcaggatcatcatcgttcccggcgcgttctttttgctgacaatggcatccgcaataatcaaatgatcgcgatttgccatgtcgccaagcagctccattcccgccgtgccgccatcgaggatctcaacataatccggcagaatgtatcgttgctctaacgcttcgacaatccgcacaccgatggcttcatcggtcagcaaaatattgccgacccctaagactaaaatacgcattacagaaccttcacactaaccacttcgttgccgtcagcatccactacgtgtaccgcacaggccatgcacgggtcaaaggagtgaatggtacgcaccacttccagcggtttattcggatcggcaaccggtgtacccaccaggctctgctcgtaaggaccgacgtcatcattgaagttacgcggaccagagttccaggtacttggaacaaccgcctggtagttgctgatgataccgtctttaataaccatccagtgagagagcataccgcgcggcgcttcgaggaagccaacacctttgaattcacccgttgccggaatgttcggcttcacaaaggtggtgtgatcgcctttgccgatattggtgatcagtgcactgtattggttttgcaggatatcctgcaattcacagcagtgaacggtacgaccaataatacggcccagcgtggagtgcagctgtgccacttccagcgtgttgccagtcagtttctgataaatcgcaacgatttcattcagtttgttctgggtagattcgcgacctgccgccagtttcaccagcatattagccagtggccccacttctaccgttttgccgtagaaagtcggacttttcacccaggaatatttcccgtcgtcagaccaaccatcataagccggaatggtggtgccttcccacggtgcctgcggcgcttcgtctttataccaggagtgcttcgcgctttcctgaatgcctttgatcaggtattcatcggaatgagaagtgatcggacgatagctggacagatccgcattctcaatgtagccgcccgggaacaggaagctgccgtttttactgtcggtcgggaattccggcacgctcaggtagttcaccgcacctttaccgcgtgtcagccattccgggtagaacgcggcaataactgcggtatcaaccttataaacctgctcaacaaagtcgctcagtttgtcgatgaaagacttgatgtacatcaggcgctcaaggttcagcacgcccaaaccgtcgaggttgatcgggttcgcgacaccacctaccgccaggttctgaatgtgcggcgttttaccgcccagcagcgccacgacgcggttagcgtcacgctggcactccaacgcttgcaggtagtgcgctaccgcaatcaggttcacttccggcggcagtttcatcgccggatgaccccagtagccattagcgaaaatacccaactgaccgctggcaaccagatctttgatcttgttctgaactttggtgaactcttccggactgttcaggtgccaggtgctaacgcctttcagcatttcggaggctttggttgggtcagcttgcagtgcagaagtgatgtccacccagtccagcgcgctaagctgatagaaatgaacaatatggtcatgcgtggtgtgcgcagccagaatgatgttacggatgtattgcgcgttaaccggaacgtcgatattcagcgcactttctgccgcacgaacggaagacagcgcgtgagtggtagtacatacgccacagatacgttgcacaatcatccatgcatcgcgcggatcgcggtttttcacgatctcttccatgccgcgccacatggtaccggaagcccatgctttgctaacgacgccattttcgatttcgcaatcgatgcgtaaatgcccctcaatacgggttaccggatcaatagtaattctctggctcatgctttgctcgcctcatgacgattatgatcgttttgttttaaaggaggaagtatcggcagtagacgaatgagtacgatgtaagcgcaaatctcaatagccacaaaaccaatagaaatcaacagttcttcccaggtcgggaagtaggcgtaaccgccgcccgggttgaatgccaccaggctataggtcagacgccaggttgcacaacctaacagtgcgctcagtgcactcaggaacagcatgcgggaatcattacgcagcttcgccacacgcagaacgaccagcgggaagagcatcagcaggacttcaatccagaacatcacggagtagaagtcaccggcaaacgctaagctcagcttgtcgcgatagataagctcgccaaagcgcagcacgatgaaaatcgccagcaacacactgatggtgttggtcagcttaacaaacagactcttttcatccggaccgttgccacgcagacccgcctgcaccaggctaccttcaaagatgacaatgctgaagcccatgatgaacgccgtcagcaggctgaacagcggcaacatttcatagctctgccacaacggatgcaccttgtagcccgcgctgatcatcaggctccccatactagactggtgcatggtcggcagcagcgcaccgagcgcgatgatgaagaacatcaccttgtttagtcgctgtaggctcaccttccaccccagacgttcaaacagtgccggagcaaactccagtgccatcacgccgatatagatggtcatacagaccgccgtctcgaacagtacgctgttcacgttgaagtgacccggaatgtagaagtacggcaggttccagtagcgacccacgtcgatagtgatgctcaagccacccagactgtaaccaaacagactcgccaacagcgccggacgcaccagcggatggtattgcccacggttaaagacgtataccgcccacgccagcgcccagccgccacaggcaaagccggtgccaatcagcaggtcaaacgcgatccacacgccccacgggaagccgccgttcaggtcagagacagagcccagaccgaacaccagacgcttcacaatcaggagcatacagatgacgattaacggtccaaaaatcatgaccggtttactgatgattttgccgcccagcggttgtggatcatgactcatgatcgtctcctccgtcgtgattattcaactctcatgatcgtctcctccgtcgtgatggtcgtttttggtgttgcgacgaaccagcacggttaagcccgccagcacagccagtggtagcatcatgcctttatacagggtgtgttgaatattttcggaacgcgcaccggtagaaagatcgtccagtttcggcaggtcgagattttcataaggcacacccgtcagtaccagaacctgagtaccgccgccctctttctcgccgtacagatgcggataatatttcggcaccgtatgcaggtaagtgtcgccagatttcagcgtctgacgcggatagtggtattcgctgccaggcttcagcgccagacgttttttcgcctccgccatcagctcttcacgcgtaccgaaaatcaccgcgcccgccgggcacacttctacgcagccaggtagaccgcctttatcgagacgttccacacctttctggttgcacagctcgcacttatgcagcgcaccaaacgggttgttgtagtcgtacttcggcacgttgtacggacaggcgaccatgcagtaacggcagccggtgcacacatctttgtcgtaatggacaatgccggttttcggatcttttttcagtgcagagaccgggcacacagagacacagttcggatcgacgcagtgcatacactgtttcttaatgtacgcgtagccgttctcctcctggtctttgttgacccctgtgccgctggtccacacctgaatgatgttattggtatacgggctcagtttgtcgttgttgctccaggtctgttccccttgcgggttacgttcagggaaattgatatcctgacacttggtgacgcaagcctggcagcctacgcacaaggtgctgtcgtacaacatccccaggcttcccggaattggcgggcggttttcagcagccgcatgactgacagacggcagcgcgcccgtcagcaatgccccgcaggaggctgctttaataaaattacgtctgttcacggttattctccccgactgtcagcgttatctttcttttgctgacgacccagttcacgcaccgccatcacgctgacaccggcaaccaacccaaccacaccgccgagcaaaccaatagcgcctgcagagacgttgccgccctctttagcgttaacatccggtttctgactacgcggagtttgattttcgacgttggcaagctgatggatgcctttatggaagccgataccttcttcgttacagccatagcaagggtgaccaatcgccaccggccacacaccgccaacatcgcagaattgcagcgtactgcagttgccgtaagtttctggccctttacagccgaggtggtacaggcaccagccttcgcggtggccttcatcaccgaactctttggcaaaacgaccagcatcgaagtgcgggcgacgttcgcagtgttcgtgaatcagacggccataggcgaaggtcggacggtttttgtcatccagtttcggcggtttgccgtaagtgatgatgtgcgcaacggtcgcgaggaagttgtgcgggttcggcgggcagcccggaatattgataacggttttgcctggcagaacttcttgcaggctgactgcgccagttgggttaactccagctgcggcaacaccgccccacgcagagcaggaaccgatagcgataatggctgctgcgccttccgccgctttgcggatgtgatccacaatcggctcaccggcaaccatgcaataaataccgttatcttttaatgggatggaaccatccaccactaacacatactgccctttgtacttctcgagagcgttatgtttgttctcttcgacctgatgaccgaaggcggcggaaagcacttcgtgatactccagagagatagtctccagtacgaggttttctaccgttggatgcgttgcacgaagcagagattccgtacaaccggtgcactcctgcgcgccaatccagataactggcggacgctgcgggttagtaacgctttcggccatctctgcagcggctttgctacttaaccccatggtggcggctaatgctgcacaaagcttcatgaaatcacgacggttaatgccgtgagaatggatgagggtgttatctccagtcatttatagttattccgttgcgaagacctggcatatattttgcctcaatcgcaaaatcaataatgcgatcgatgcgccatttaccacacatttattatggttatcgatatcatgatactgcggcggggcgctaaaacgaagggaagaagcattagtgtaattaattaaagcaagataatacgtatgtttgatcaattttcgaggcgataaccggccataaaaaagcgcaacgtagaacaggaattattctcacgaaagaaatccattaccatctctttatccagtccatagcggcgcgtcagaatacccgcttcccaggcgctaagctggcgatctccggtcttttcgtacatccggtgactgtagcctaatacaaaaccgcgtttataatcggcacagaattttgtcacattaaccgcactgtcggcatgcgttgcttttaatcccgccattaagcctttaccaaaatggttattcatcgttcacctcattcgctatatattgtcatatatagcgatattttaggcaaagaacgacttttgcgcacgctattttttcatgcttgtttaagacgtaatcccgtaagagataaacctatcaggagagatatttatcgaaccatttcagtgtcctttgccaggcaagatcggcggcagatttgtcataacggggcgtggaatcattatggaatccgtgattaacccccggatagatatacgcctcataaaccttattattggctttcaacgccgcctcgtaagcaggccagccctcgttgattcgggtgtccagttccgcgaagtggagtagtaaaggcgcttcaatcttcgccacatcggcagtgggtgcctgacgaccataaaacggcaccgcgcaggccagttccggatacgcgacagccgccgcgttgcttacgccaccgccatagcaaaatccggtaatacccactttgcctgtcgcttgcggatagcgttgcataaactcaattgcggcaaagaaatcattcatcagtttgttggatcaacctgctgttgcagctcacgacctttatcatcatttcccggataacctccaacggaacttaagccgtcaggtgccagggcgatataccccgccttcgccactcgccgtgccacatcttcgatatacggattcagtccacgattctcatgcaccaccactacggctggcgttttgccgctcatctttgcgggcttcaccagataaccccgcacctcgccgtgaccatttgggctaggatacgtgatgtactcagcaacaatttccgggtcggtaaactctacctgagtcgccagcgcataatttggcttgagcaaatcaaacaacgctaatgccgtcatcccgcctaccgcacttcgccgcaaggttgaggaactcacgtttcgagattttcccgtgagcgtaatagtcatagtaatccagcaactcttgtgggaaatctttggcggttaaacgcggcatcgttgcactcctcagttggtgtttttttaagcaaagcataagcacgtatttttgcccagtttttcgtcactctgtgagccagactacgggatacgcgctggcgaatcgctaaactagaaacattgtttcgaaattgaacggtggaaaggagaggtcatggtctggttagcgaatcccgaacgttacgggcagatgcaataccgctattgcggaaaaagtggtttacgcctgcccgcgttaagcctcggtttatggcacaatttcggtcacgttaacgcgctggaaagtcagcgtgcgatcctgcgtaaagcgtttgatttgggcattacgcactttgatttagccaacaattacgggccgcctccaggaagcgcagaagagaactttggtcgcctgctgcgggaggattttgccgcttatcgcgatgaactgattatctctaccaaggctggctacgatatgtggcccggcccttacggctctggcggtagtcgtaaatacctgctcgccagcctcgaccaaagcctgaagcgtatggggcttgagtatgtcgatatcttttactctcatcgcgtcgatgaaaatacgccgatggaagaaaccgcctctgcgctggctcatgcggtacaaagcggtaaggcgctgtatgtcgggatctcctcttacagcccagagcggacgcaaaaaatggtcgagttgctgcgcgagtggaaaattccgctgttaattcatcaacctagctacaatttactgaaccgctgggtggataaaagcggcctgctggataccctgcaaaataacggcgtgggctgtattgcctttactcctctggctcagggattgctgaccggaaaatatctcaacggcattccgcaagatagtcggatgcatcgtgaagggaataaagttcgtggtctgacaccgaaaatgcttaccgaagccaacctcaacagcctgcgcttattgaatgaaatggcacagcagcgtggacaaagtatggcgcaaatggcgttaagctggttgctgaaagatgatcgcgtgacgagcgtattgattggtgccagccgcgcggagcaactagaggagaacgtgcaggcgctgaataatctgacatttagcaccaaggagctggcgcagattgatcagcatatcgccgatggcgagctgaatctgtggcaggcgtcttccgataaatgacctgttaataacgggcgcgcgaaccgcgcccgaatcagatcagtgattatgacgagtcagtcggtcaagatagcccatcacaaatgcagaaagcacaaacgtcagatggataatgacgtaccacatcagtttgttatccgggacatttttcgcatccataaagacgcgcagtaagtgaatggaagaaattgccacaatgctcgctgctactttgtttttcaggctcgttgcgtccattttccccagccagttcagcttctctttgttctcggagatatccagctgactgacgaaattctcataaccggaaaacatcaccatcaccagcaaaccgccaaccagcgtcatatccaccaggctcagcaacacgaggatcaaatcactttccgccatgctgaagatattcggcagtacgtgaataatctcctggaagaacttcagcgccagggcaactaacgccaggctaaggccaaagtacacgggggcaagcagccagcgagaagcatacattgcattttcaagaaaacgttccatacattcctgtcgtgtagttaaaacgggcaacagtatatcgcaattgagtaaacagcacgcaacagcaaatcaacatatacgttaaacctttgtcgcataattctgaggtttagggatcttcctggttcccttatcaacgcatcgagaacgtctacccttaaaggacgttgaacctgaagggagaaaaacgatgtctcatttaaaagacccgaccacgcagtattacactggtgaatatcccaaacagaaacaaccgacgccaggcatccaggcgaagatgacaccggtaccggattgcggcgagaaaacctatgttggtagcggtcgcctgaaagatcgtaaagcactggtgacagggggcgattccggaataggtcgcgctgccgccatcgcttacgcgcgtgaaggggctgacgtggcgatcagttatcttcccgtggaagaagaagacgctcaggatgtgaaaaagatcattgaagaatgcggacgcaaagccgttctgctgccaggcgatttaagcgatgagaaatttgcccgtagcctggttcacgaagcgcacaaggcgttaggcgggctggatattatggcgctggtcgccgggaaacaggttgccattccggatattgcagacctcaccagcgaacagtttcaaaagacctttgccattaacgttttcgcgctgttctggctaacccaggaagcgatccccctgctaccgaaaggtgcaagtatcatcaccactagcagtatccaggcataccagccaagtccgcatttactggactatgcggctacgaaggcggcgattctgaactacagccgtggcttggcaaaacaggtcgcggagaaaggtattcgggtgaatattgtcgcgccaggcccgatctggacagcactgcaaatttccggcggacaaacgcaggataagatcccgcagtttggtcagcaaacgccgatgaaacgtgcggggcaaccggcggaactggcccctgtatatgtttatctggcaagtcaggagagcagctacgtcaccgcagaagtgcacggcgtgtgcggcggcgagcatttaggttaaaaaaatgcccggttgtgaaaagcaaccgggcatcattgtgaattcactcttacctgatgtggcgaaaacgccttatccgcctacaaacgcatgaagattcaacatgttgcaatagattttgtaggcctgataagcgtagcgcatcaggcattgagcacctaatgccggatgcgtcgtgaacgccttatccggcctacaaacgcacgaagattcaacatgttgcaatagattttgtaggcctgatgagcgtagcgcatcaggcaattctactttacttcgctttggcggtttcttcgccgaccagacctatcttcaggtaacccgcctgatgcagcgtatccattaccttcatcaacgtctcgtaatcgacggttttgtccgctcggaagaagatggtggtgtctttcttgccttcggttaacgcattcaacgccgtaatcattgtttcatcggtgaccggatcgttaccgataaacatgctgttgtctgccttcacgctcagataaaccggtttttccgggcgcggctgcggcgtgctggtagaagcaggcaagttcaccttcacatctaccgtcgctaacggtgccgccaccataaagataatcagcagaaccaacatcacgtcgataaacggcgtcacgttgatatcatgcatttcgccgttatcgtcgaggttttcgttaagatgcattgccatcggatattatcctgcgcgtaatttttgtgcgacacgaaccggatgcgcagcggcgctggcttccagatccaggtcacggctttgcagcaacaatacctgcgctgcaacatcacccagcatcgctttaaagccgccaatctggcgtgcaaatacgttatagataacgaccgcaggaatcgctgccacgaggccgattgccgttgctaacagagcttctgcgatacccggcgcaacgactgccaggttagtggtctgcgtttgcgcgataccaataaagctgttcatgatgccccagaccgtaccaaacagaccaacgaacggagaaatcgcgccgatggttgccagatagccgttaccgcggcccatttgacgacccactgcggcgacccgacgctccagacggaagctggtacgttctttaataccttcgttatcgtcgctgccttcactcagttccagctcattctgcgcttcattgagcaaatgcaggcttaagcttttgctaccaaaatcagcggcgatatcgttggcctggtttaaggaacgcgcttcagccagcagttgctgctcgcgcttaaggcgacgcttctgattgaagaactctacgctcttactgaagaagattgcccaggtgactacggaggccaaaataagcccaatcatcacgcacttaacgacaatatcggcgtgctgatacataccccagacggaaaggtccgtctgcattaaattattacccactgtgtatctccaggacgcaagtcacaaaatctgcgcataataatatcaaaacgacgtcgaattgatagtcgttctcattactatttgcatactgccgtacctttgctttcttttccttgcgtttacgcagtaaaaaagtcaccagcacgccatttgcgaaaattttctgctttatgccaattcttcaggatgcgcccgcgaatattcatgctagtttagacatccagacgtataaaaacaggaatcccgacatggcggacaaaaagcttgatactcaactggtgaatgcaggacgcagcaaaaaatacactctcggcgcggtaaatagcgtgattcagcgcgcttctagcctggtctttgacagtgtagaagccaaaaaacacgcgacacgtaatcgcgccaatggagagttgttctatggacggcgcggaacgttaacccatttctccttacaacaagcgatgtgtgaactggaaggtggcgcaggctgcgtgctatttccctgcggggcggcagcggttgctaattccattcttgcttttatcgaacagggcgatcatgtgttgatgaccaacaccgcctatgaaccgagtcaggatttctgtagcaaaatcctcagcaaactgggcgtaacgacaagttggtttgatccgctgattggtgccgatatcgttaagcatctgcagccaaacactaaaatcgtgtttctggaaagcccaggctccatcaccatggaagtccacgacgttccggcgattgttgccgccgtacgcagtgtggtgccggatgccatcattatgatcgacaacacctgggcagccggtgtgctgtttaaggcgctggattttggcatcgatgtttctattcaagccgccaccaaatatctggttgggcatagtgatgcgatgattggcactgccgtgtgcaatgcccgttgctgggagcagctacgggaaaatgcctatctgatgggccagatggtcgatgccgataccgcctatataaccagccgtggcctgcgcacattaggtgtgcgtttgcgtcaacatcatgaaagcagtctgaaagtggctgaatggctggcagaacatccgcaagttgcgcgagttaaccaccctgctctgcctggcagtaaaggtcacgaattctggaaacgagactttacaggcagcagcgggctattttcctttgtgcttaagaaaaaactcaataatgaagagctggcgaactatctggataacttcagtttattcagcatggcctacagctggggcgggtatgaaagcttgatcctggcaaatcaaccagaacatatcgccgccattcgcccacaaggcgagatcgattttagcgggaccttgattcgcctgcatattggtctggaagatgtcgacgatctgattgccgatctggacgccggttttgcgcgaattgtataacattgccacttttggacaattttgcagacattttattgtgaaaagtcttaaattgttgcgtccgggatcaaggcgtcccggacgattcaggagtacaataggcagataaaggcttaaacgctgttccacaggaaagtccatggctgttattcaagatatcatcgctgcgctctggcaacacgactttgccgcgctggcggatcctcatattgttagcgttgtttactttgtcatgtttgccacgctgtttttagaaaacggcctgctgcccgccagttttttgccaggcgacagcttgttgatactggcaggcgcattgattgcccagggggttatggattttctgcctacgattgcgattctgaccgccgcagcaagtctgggctgctggctaagttatattcaggggcgctggttagggaataccaaaacggtgaaaggctggctggcacagcttcctgctaaatatcaccagcgcgccacctgcatgtttgaccgccacggtctgctggcgctgctggctggacgttttcttgcatttgtccgtacgctgctgccaaccatggcgggaatttccggtctgccaaaccgccgcttccagtttttcaactggttaagtggattgctgtgggtcagcgtggtaaccagttttggctatgccttaagtatgattccgttcgttaaacgccatgaagatcaggtaatgacgttcctgatgatcctgccaattgccttgttaaccgctggcttgttaggcacgctgtttgtggtgattaaaaaaaaatactgtaacgcctgacgattttccccgttcccggttgctgtaccgggaacgtatttaattcccctgcatcgcccgcattcttgccgcatcttcccccggcgtcacaccgaagtaacgtttaaactcacggctaaattggcttgcgctttcatagccgacgcgcatcgctgctgcgctggccttcatgccgtcatggatgatcatcatccgcgccttatgcagacggtaattcttcaaatactgcaacgggctggtactggtgacagacttaaaattatggtggaacgcgcttacgctcatgttggcttctgccgccagttgctcgacgctcaggttttcggtgtatttattctcaatccgtttcagcacgcggctaatcagactgaagtgagtctggcgactgaccagcgccagtaacgcgccgccgcaaggtccggtcagcacgtagtacagaatttcgcggatgatctgtttgccgagaatacgcgcatccagtggtcgctccatcacgtcgagtaaccgctccgccgcgcataaaatctcttcacttaacgtggcggagttaatcccgctggctgccatgctcggctggaaatgctcatcttcgccaatgtccatcaacagttcctgtaactgcaaaatatcgacattgagacgcaaccctgccagcggcacctcactcgtggcataggtttcgcactcaaacggcaacggcaccgtcagcagcaggtattcattggcatcataacgaaacacgcgttcattgatataaccgattttatgcccggaaaagagaattatgatgccaggctcgtacatcaccggtgtacgtgcgaaaggcgtctcgccatacaacaaacgcacatcgggcaacagtccactcaaactattttctttatttttcagtttattaactttatccgccagcaagcggcaaatctcttcacgtttcatatcgcgtaatttcttaggaataatgcggcaattactttgtgcgcaattttgtagcatttctccagcactctggagaaataggcaagacattggcagaaatgagcattgagagccagggcgctggcgatcacaatgaaaaacatcaggcagatcgttctctgccctcatattggcccagcaaagggagcaagtaatgaacaactttaatctgcacaccccaacccgcattctgtttggtaaaggcgcaatcgctggtttacgcgaacaaattcctcacgatgctcgcgtattgattacctacggcggcggcagcgtgaaaaaaaccggcgttctcgatcaagttctggatgccctgaaaggcatggacgtgctggaatttggcggtattgagccaaacccggcttatgaaacgctgatgaacgccgtgaaactggttcgcgaacagaaagtgactttcctgctggcggttggcggcggttctgtactggacggcaccaaatttatcgccgcagcggctaactatccggaaaatatcgatccgtggcacattctgcaaacgggcggtaaagagattaaaagcgccatcccgatgggctgtgtgctgacgctgccagcaaccggtagtgaatccaacgcaggcgcggtgatctcccgtaaaaccacaggcgacaagcaggcgttccattctgcccatgttcagccggtatttgccgtgctcgatccggtttatacctacaccctgccgccgcgtcaggtggctaacggcgtagtggacgcctttgtacacaccgtggaacagtatgttaccaaaccggttgatgccaaaattcaggaccgtttcgcagaaggcattttgctgacgctaatcgaagatggtccgaaagccctgaaagagccagaaaactacgatgtgcgcgccaacgtcatgtgggcggcgactcaggcgctgaacggtttgattggcgctggcgtaccgcaggactgggcaacgcatatgctgggccacgaactgactgcgatgcacggtctggatcacgcgcaaacactggctatcgtcctgcctgcactgtggaatgaaaaacgcgataccaagcgcgctaagctgctgcaatatgctgaacgcgtctggaacatcactgaaggttccgatgatgagcgtattgacgccgcgattgccgcaacccgcaatttctttgagcaattaggcgtgccgacccacctctccgactacggtctggacggcagctccatcccggctttgctgaaaaaactggaagagcacggcatgacccaactgggcgaaaatcatgacattacgttggatgtcagccgccgtatatacgaagccgcccgctaagctttttacgcctcaaactttcgttttcgggcatttcgtccagacttaagttcacaacacctcaccggagcctgctccggtgagttcatataaaggaggaacgtatggctaatccaaccgttattaagctacaggatggcaatgtcatgccccagctgggactgggcgtctggcaagcaagtaatgaggaagtaatcaccgccattcaaaaagcgttagaagtgggttatcgcagcattgataccgccgcggcctacaagaacgaagaaggtgtcggcaaagccctgaaaaatgccagtgtcaacagagaagaactgttcatcaccactaagctgtggaacgacgaccacaagcgcccccgcgaagccctgctcgacagcctgaaaaaactccagcttgattatatcgacctctacttaatgcactggcccgttcccgctatcgaccattatgtcgaagcatggaaaggcatgatcgaattgcaaaaagagggattaatcaaaagcatcggcgtgtgcaacttccagatccatcacctgcaacgcctgattgatgaaactggcgtgacgcctgtgataaaccagatcgaacttcatccgctgatgcaacaacgccagctacacgcctggaacgcgacacacaaaatccagaccgaatcctggagcccattagcgcaaggagggaaaggcgttttcgatcagaaagtcattcgcgatctggcagataaatacggcaaaaccccggcgcagattgttatccgctggcatctggatagcggcctggtggtgatcccgaaaagcgtcacacctagtcgtattgccgaaaactttgatgtctgggatttccgtctcgacaaagacgaactcggcgaaattgcaaaactcgatcagggcaagcgtctcggtcccgatcctgaccagttcggcggctaacatgcaaattctcccggtggcggtaatgttccgctaccggacttttcagaaatcatttattcccctcgcgtcccgcccgttgttactcttccttgttcaggaatgccaaatataaggacatcatcatgcagagccggaagctcttaaaagaacaactcatctatatccgggataaacgcaacggagaggtgaaaaacagatgaaaataatacttctgtttttagcagccctggcaagttttaccgtacacgcacagccccccagtcagaccgtagaacaaacagtccggcatatttatcagaactataaaagtgatgccactgccccttattttggtgaaaccggagagcgggcgataacttctgcgcgtattcaacaggcgcttaccctgaacgacaatcttacgctgccgggcaatattggctggctggattatgatccggtttgtgattgtcaggattttggcgatctggtgctagaaagcgttgcgataacccaaactgacgccgatcatgccgatgccgttgtgcgctttcgtatctttaaagatgataaagaaaagaccacgcagacactgaaaatggtggcggaaaatggtcgttgggtcattgacgatattgtcagcaatcatggcagcgtcttacaagcagttaatagcgagaatgaaaaaacgctggccgctttagctagcttgcaaaaagaacagccggaagcctttgttgccgaactctttgaacatattgctgattatagctggccgtggacgtgggtggtttccgactcttaccgccaggcggttaatgccttctataaaaccaccttcaagacggccaataatcccgatgaagatatgcaaatagaacggcaatttatttacgacaatccgatctgttttggcgaagagagcctatttagtcgcgttgatgaaattcgagtcctggagaaaaccgccgattccgcccgcattcatgttcgttttacgctgaccaatggcaacaacgaagagcaagaactggttttacagcggcgcgaaggcaagtgggaaatcgctgattttatccgcccgaacagcggcagcctacttaagcagattgaggcaaaaactgccgccagattaaagcaatgagctgaattaaataacaattagccggaacaataaataaaagggaacactatatgaaaacgattttcaccgtgggagctgttgttctggcaacctgcttgctcagtggctgcgtcaatgagcaaaaggtcaatcagctggcgagcaatgtgcaaacattaaatgccaaaatcgcccggcttgagcaggatatgaaagcactacgcccacaaatctatgctgccaaatccgaagctaacagagccaatacgcgtcttgatgctcaggactattttgattgcctgcgctgcttgcgtatgtacgcagaatgataaaaaaatccccggtagcgtgtcagttgccggggatattttttaacgtccaaccgccgctttaggccgtttcttcgcaccagcattcaccggacgagattgcgtagagctcgctttttttgccgtagcaggcgtctgacgctgggtcgccatcggcgtatgtttcgtcaacgccggacgggtattgcggttctggcgacgagcttcacgcatctcttcaatggttggcgcaggcactaagcaatcgcgacggctgccaatcagatgctttttgcccatcgcttccagcgcctggcggattaacggccagtttgccggatcgtggtaacgcaacaacgctttatgcaaacgacgctgtttgtcgcccttcggtacgaagacgtcttcgctcttataaccaatcttcgccagcgggtttttcccggtgtaatacatggtggtactgttcgccagcgggctcggatagaagttctgcacctggtcgaggcggaagcggtgctttttcagccacagcgccagattcaccatatcttcatcacgcgtaccggggtgcgcggagatgaaataggggatcagatactgctctttacctgcctgtttactgtaagtatcgaacagctctttaaagcggtcatagctgcccatgcccggcttcatcatcttgcttaacggcccttcttcggtatgttccggggcaatcttcagataaccgccgacgtgatgggtcgccagttctttgatatagcgcggatcttctacggctatgtcataacgcacaccagaggcaatcaggatctttttaatgcctttcagatcacgcgcacggcgatagaggttgatcgttggttcgtggttcgtgtccatgtgcggacaaatatccggataaacgcagctcaaacggcgacaagtttgttcagcgcgtgggcttttgcagcgcaacatatacatgttggcagttggcccaccaagatcggaaatcacgcccgtaaaacctggaacggtgtcgcggatcgcttcgatctcattaatgatgctatcttcggaacggctctgaataatgcgcccttcgtgctcggtgatagaacagaaagagcagccgccaaagcagccacgcataatgttgacgctaaaacggatcatttcgtaagccggaatacgggcattgccataggccggatgtggcacgcgcttgtatggcagcgcaaaaacgctgtccatctcttcggtagaaagcggaatagcaggcgggttgatccacacatagcggtcgccgtgtttttgcatcaatgcgcgggcacagcctgggttggtttcgtggtgcagaatacggctagcatgggcgtacagcactttatcgcccttcactttctcgaaagaaggcagcaacacgtaggttttttcccacggtttcgggcgcggtggctgcacggttacggctttggcttcctgctttttcggtgccaccggtttgttatccgcgcacggcaaatcttcaccatacggatgcgggattgggtcgatttttccaggggtatcaagacgggtggaatccacgccgctccagccaggcagcgcctctttcacgataatcgcggtattacgcacatcgcggatttcactaattggctcgcccatcgccagacgatgcgccacttccaccagcggacgctcaccgttaccaaacatcagcatgtcggctttgctatccaccagcacggaacggcgcacggtatcggaccagtaatcataatgcgcggtacggcgcagactagcctcaataccgccgaggatcaccggtacatctttccacgcctctttacaacgctgggtataaaccagtgtggcgcgatccgggcgcttacccgcgacgttatccggcgtgtaggcatcgtcatgacgtaaacggcgatcggcggtataacggttgatcatgctatccatgttgccagcagtaacaccgaaaaacagattcggtttacccagacgcataaagtcgtctttgctgctccagtccggctgggcgatgatcccgacgcgaaagccctgcgcttccagcatacgaccgcaaatcgccatcccgaagcttgggtgatcgacatacgcgtcgccagtaaccaaaatgatgtcgcagctatcccagccaagttgatccatctcttcacgagacatcggcaaaaacggtgccggtccaaaacaggcggcccagtactgcggccaggagaacaggtcgcgatccggttggatcagggagatagagctcattttgcttccagaaatgataaaaaaataatcaaaggccggggattataagccggaacgaaagagaaatcgaaaggtattccatactcgccctcctcgggcgagtatgaagattacggtaccggattgaccaacagttgcccaatgctgccacggtccgccatttccagcgtctgactgttgaagtagaacgggaagtgcgcccaggaaggctgaccgaaataaacaagcagctccacttgtccgtcaacccaaacggtatctttccagcctctgtcttccgggaacggcatcgcgccattcacgttacggatctggaacattacgccttcaatatggaacgcttgcggctcgtccgcgcgtaccgtccagcgttcccacgttccttgctgcgcggtgacatcaatacggttgacgtcccacagctgtccattaatacccgggtcatcacccagactgatatcgcgactgcgaattgggctaccagccatgatttcagttggcagcaagcgcatcggaagactgtctgtgaccagcggcagaaggccggttgggcgcagcgttagcaccagggtagaaaccagaatactggatggctcaaagaagccacgaatacgatcaacaatgctcgccgcttcgccacaggtgatgctcacttcatcgccgttgctcatatccaccagaatctcgcggcgctcgcccggtgccaggctaagttgcttcacgcttacaggagcaggcaggaatccctgatcgccagaaatcacatgtaacgggcgaccatcgttcatctgtagttgatagcgacgagagttgctcgcgttcagcagtcgcaagcgcacccagccacggctgacttcaacgtacgggctttgtacaccgttaaccagcagcgtatcaccaacaaagccgccgcttcccggttcgttgtattctggcgtaccaaagttatccagccgtttatcctggataatgaccggaaaatcatccacaccataatggttggggataggcaggctcttgctgacttcatcttccaccagccacattccggcaaggccgttatagacctgctgagccgtgcggttgggagtattggcgtgataccacagagtagctgcgttctggcgaatgggcagtacgggtgcccagtcagcgtttgggctcatcatccgtgccggaccgcccatcagcgggcctggtacctgtagcccggccaccgtcatactgacattttctgtcaggcggttgctgtaaataagcttaacatcgtcgcccttccagacgcggatagtcggccccaggtaacgaccattgattccccagacgctcgcgcgtgtccctggcgtaaaactccagtgcgcacgttgtacagtcataaacagcggttgcccacggcgagattcaagtagcggcggaacgggtagcggttgctgttgcccggctgcgctggccttcaggggaacagcgcctgcacaaagtgcaatcccgcttgcctgaatgaactgacgccgactgagactcatatttgctccatgtaaaactggctaaagtaataccgtgcaggaaagtgttccccgcaaaaatacagattgccgacttaaacttttccggcggcttcgcgttctgcgacttctttatcgagctcggcgattttttgttccattatgctacgacaatgggcagccagctcacgaacctgatctttgccatactgactgacgtcaattggcggcagcatttcgacaatcaccagaccgttgtgcagtcgattaagattaatcttattgctagttgtagagacgcacacgggaataatcgggacgcccgccgcaattgccgcgtgaaatgctccagtcttgaacggtagcaggccgcgaccacggctgcgggttccttccgggaacatccagatggaaatacggcgttttttgaagtgattcactacttccgcaatggtgccgtgagctttagtgcgattgtttctgtcgatcaataagttgccggttaaccagtacaactgcccgaagaaggggatccacagcaagctctttttacctaccgtcaccgtcggcggttgcacgatgttgcttgctgtcaccatgtcatagttgttctggtggttagcgatatagatagcattgccgtagctttcagcgtctgtaggtttacggcactcaactttcaggccaaacagcggcgcaagacggccaaacatatgcccaaaggtggccacatgtttcgggttacgcgggctgaaaaggcagtaaatggagccgaatacacagactaagatgctgtaaatcacggtaataataagacgaaagatatatagcataacaccctctgaaggtctgagagactggcattgtacgtcacctgaaatcaggttagggcattgttaaaagccgctctctggaaaagcgtattgttaatcgcaacgcatgaataaacaacggtttcaagggaatttttatcgtttccgggggttgaatacgctgccggatgacgacttaacgtttcatccggcgttccttgcaagcgggaggaaacagcgccctccccggcatattactcttcgctatcaccgctgctggcacggcgaggagagtcgatctcaacacgatcgatacgctgcaaaccgcgcatcaacgtaccgcggcgtccacgttcgccagtgactttctgtaactcttccgggcgcagtttaattttgcgtttcccaacatgaatggtcagcgtgctttgcggcggcagaacgtacaattgcgccagaccatcttctccacgcgcggcttctgcgcttggaatgttgataatcttgttgcctttgcccttgctcagctgcggcagatcacttaccgggaacatcaacatacggcctgcctgagtgattgccagcagcatatcggaagcatcttcaatcaccaccggcggcataacatgggcattttccggtaaggtgatcaaagccttacctgcacggttacgcgccaccagatcgttaaaggtgcagacgaaaccgtaacccgcatcggaagccatcagcagtttctgatcgtcgctttccatcagcatatggtcaacggtcgccccaggcggcaacgttaatttgccggtgagcggctcgccctgaccacgcgcgctcggcagcgtaatcgggtcaatggcatagctacgaccggtggaatcaacaaacactaccggttggttgctcttacctttcaccgccgctttgaagctatcacccgctttataattcaggcccggcgcgtcgatatcatggcctttagcgctgcgtacccagcccatctggctcagcacaatggtgacaggttcagacggcagcatgtcgtgctcgctcatcgctttcgcttcttcgcgttcctgcaacgggctacgacgatcgtcaccgtaggcttgcgcgtctgcctgcagttctttcttcagcaggttattcattttacgctcggaagccaaaatgccctgcaactggtcgcgctctttttccagttcactctgctcaccgcgaatcttcatctcttccagtttggcaagatgacgcagtttcagttcgaggatcgcttccgcctgggtttccgtaaggccaaaccggctcatcagcgccggtttcggttcatcttcattacgaatgatctcaatcacttcgtcgatattgagaaacgccaccagcaaaccttcgaggatatgcaggcgcttgaggactttctccagacgatagttcagtcggcggcgcacggtatcgcggcggaacaccagccattcggagaggatttccagcaggtttttcaccgccggacgaccatccagaccgatcatattaaggttaatacgatagctcttttccagatcggtggtagcgaagaggtggttcatcacctgatccatatccacgcggttggaacgcggcacaatcaccaggcgggtcgggttctcgtggtcagattcatcgcgcagatcgtcaaccatcggcagctttttgttgcgcatttgcgcagcaatttgctccagtacgcgcgcaccactaacctgatgcggcaatgcgctgataaccaccgcgccatcttctttcttccacaccgcgcgcatacgcacactaccacgtccgttctcgtagattttacggatctcggcgcggctagtgataatttccgcttcagtcggataatccggcccctgcacgatatccagcagctgatcgagcgtggttttcggctggtcgattaatgcgattgccgcctgagccacttcacgcaggttatgcggtggaatatcggtcgccatgccgacggcaataccggtggtgccgttaagcaaaatgtttggcagacgggcaggtagcattttcggctcctgcaaagtgccgtcgaagtttggcacccagtcagccgtcccctgccccagctcgctcaatagcagctcggaatatttgctcaaccgggattcggtgtaacgcattgccgcgaagcttttcggatcgtccggcgcgccccagttcccctgaccatcaaccagcggataacggtaagagaacggttgcgccatcaggaccatcgcttcataacaggcgctatcgccgtgcggatggtatttacccagtacgtcaccgacggtacgggcgctttttttaaatttggcgctggcattcaggcccagttcagacatcgcatacacaatgcggcgctgaacaggtttcagaccatcaccaataaacggcaacgcacggtccatgatcacgtacatggagtagtttaagtaggcgttttccgtaaattcatgtagcgcaaggcgctctgccatatcgctcattaattctgattcctcaacttattcgccagccttcaaaggggcaatattgccggagatactacattatctgccgcgtcgagtcacaggagatcaacgtgaatagcgccgccggacgtgctccgacggcgataaaggcatcaatgtgccttgatatacaactctttgctgtagacataatcctggggattatgcagcggaaaaccgccaacgtagggtttaagcagtttgattaacggctgatagtagataggaatcagcggtgcctgttggttgatgatcacttctgcctgctgatacaacgcattacgctttgtcgcatcagtgatctgcgtggcctggtttagtaaggcgtcatactgcgcatttttccagtgaccgacgttttcttcactatcgcttttgagcgtgttcaggaagctggaagcatcattgtacgtcgcatcccagctctgccgagacagcatgaaatcaccggctcgtcgggcatcaagataggttttccactccattgtgcgcagcgtcacctgtgcacccagccattttttccattcggaagacaacgctatcgcggtcttttcatgcagatcgtacttgttgtagaacagctcaaagcgtagcggatgagaggcgtcgtatcccgcctgtttcagcaaggcttttgccatcgcgacgcgctcactcattggcttttgcagttcatcgaacgtcgtcgcgctaaagccttttacctctggcggcgtcagcgtggttgcgggcgttctcaaccccagtaccttttgcgcaataagctgtcgatcaaccgtaagatatagcgcccgacgcactcgcacatcgttaaatggcggtttctcaaggttgaagttgtaatattcgctgttcagacgcggaataattcgtagctcgccaggcagacttttttcaatggcgggaatttgctgcgccggaacccaggtgagatcgacctctcccgcgcgatagcggttatagccggtgacgctattatctagcgccagatactcaacctgttgcaatactgtatgttgcgcatcgcggtactttggatttttgcgtgcagtaatcttttcgttaactacccactgatcaagcacaaaggcaccgttgtaaaccatgttctctggcttactccagctatcgccatgtttagcgatgacatgatgaggaaccgggaacagcgtcggccaggcgagcatcgtcgtgaaccaaggaaccggctgctcaagcgtaacttcaagagtacgatcatccgtcgctttgacacccaggcttgtaacatctgctttacccgcaacaatagctgcggcattgttaatgtgcgcctgtgccagatagccagcaaaagggcttgccgttttcgggtcaaccgcgcgctgccagccgaggacaaaatcctctgccgtcagaggctgaccgtcggaccactgcaaaccgctacgcagatggaaaatatagcgcttgccgccgtccagtatctcccagcgttcagcctgagcgggctgcacctggccttcaccgtccatccataccagaccttcaaacagatccagcacaatctgcgcggcagtattctcctccaccttttgcgggtcgagcgtacctgggtcgctatgattgttgtaacgaaagacttgttgcggggcgagcggtgtgttggcgggaacgtcagcagcgtagagaggagccgcacttaccaggctgaccagccataataaatttcgcgtatacatggtattccttaccggagaaattataagcccaacaacaatacgcctgtggcattgttcgctcaaacttatcgcgagtgatttggctcacactccggtaaagaaaaaagcgagttgcccccgcttttccattaattaacggatttcattcaatagttctggatgcttatccagaacacgtaaaagtttgattgtggaaggatgaggttgggcattgcctttttcgtaacggctaaacgcatttacacctcccccaaaaatttcgcttgcctctttttgggtaagagagagcttttttcgaaccttcactataaattcaggtgccactgtttcggcattcacgctagcccgaaatgcctttacttgcgccatgaaagcatcactctcttctttattcatgatgctctcttcgcaatggacacaatataaaccgtggatacctttcaatactgtttttcgtccacggaaggtgtatggaatatctttaatgccagaaaccatttctccctggtggcaaaccggacatttcatattacttctccttaaagctgacgatcagtacgtcatgaattaccgtaattttaagataaacctggcctgtaacaagcctgggtctgtaaacatcctgccagatagtatgatcagagtaggtggtcatgcttttataaaagtcgctctcacttaatccaatgataacattacacataccatcaaaatccaaacctaactcatctgcatttaacagggcactacgtgttgtacgaacttgcccggcattgacaagttttttaacctgactcaaacgtgtatgtggtgtgcgtttttccataacccccgcctccctgttactttagttataacctaaaaggttaattacagcaatgaaaaagcacctaaaaggttagttagatgtacggagatagtgaccacacaaaacgtattctttaaggaaagtgattgaccatataagaaagtggcgcattagtagcgccagtttgaagcaggaatttataagggaagctggagtcaggcatcacgccaacggcacataaacatccgtttccagtcgctgctctgtcaccccttcggcaagattggtgtagtgaaacagaatcggtgctttacgcattttctcgccgcttgcaggcagccagtggcgaatgatgccccataccgtgtgactaatatcgtccagctcgccaacgtggcgggccacggcataacgtccaccggtaagttcaccattgctcacaccataacgattatcgggaatcggttcgctaacgctgccgcagatatcaaagcgaaacgcttccggtgcggtggtggcagggtcgtcccaggcgacgccaaaagtctggctttggttaacaggagaaagccccgtctctttacgccacatgataaatttcgccacgctgtagttgagcaattcagggctacagcggtgcggcaacatcgccacaggtatacttgggaaatcgataatgtttacatccagtgtcaggtttgtcattttgcctccctgcgaaattattcccgggaacgcgtcccgggagcggtaacaattacggatttactttgcggatctgtttgacgtcaatttcaacagaattccagtctttatcgacttcaccctgaatctcaaccgtatctttcggcgtcaccgtcacgccgttccagcgtttgtggtcgatatcaacattgatagtaccgctggcatctttgaacacgtagagatcgtcagagatgcgttcaacgatattgccgcgcagggttacccaggtgtcgtcacgcagggattttgcgctttctacagtcgttacgctgccgttcggcccctggaatcctccggcctgactttgcgttgcgcttgggccagaaaaaccgccctgctctgctgccatcaccggtgcgctgcacagggccattactgcgattactgctgcgaattttttcatgtttattactccctttaatgtctgtttccgagcatttaacaagatagtccttaacaacttcttaagggaaaaaaataaaatttagtgctgtacagagcgcgttacaacacggtttactggcagcaaatacggttatcgcagggatgaaaaaatgcgaattttactgatagaagatgacatgctgattggcgacggcatcaaaacgggccttagtaaaatgggttttagcgtcgactggtttacacaaggtcgtcagggaaaagaggcgctttatagcgcaccttatgatgcggtgatcctggatttaaccttaccaggcatggatggtcgcgatattttgcgcgaatggcgagaaaaaggtcagcgtgagccggtactgatcctgaccgcgcgcgatgcgctggcggaacgtgtagaagggctgcgtctgggagctgacgattatctgtgtaaaccttttgcgttgatagaagtcgccgccaggctggaagctctgatgcgccgaaccaacggccaggccagcaacgagctgcgccacggtaacgtcatgctcgaccccggcaaacgtatcgccacgctggctggcgaacccttaacactgaaaccaaaagaatttgccctgctggaattactgatgcgtaacgctggtcgggtactgagccgcaaactgattgaagagaaactgtatacctgggacgaagaggtcaccagtaatgccgttgaagtgcatgtgcatcatctgcgacgcaaactcggtagtgattttattcgtaccgtgcatggtattggttacacattaggtgagaaatgaaatttacccaacgtcttagtctgcgcgtcaggctgacgctaatctttttaattctggccagcgtgacctggctgctttccagctttgtcgcctggaaacaaacaacggataacgtcgatgaattgttcgacacccaactgatgctgtttgccaagcggttaagtacgctcgatctcaacgaaatcaacgcggcggatcgcatggcacagacgccaaatagattaaaacacggtcatgttgatgacgatgcgctgacctttgccatctttacccacgacggcagaatggtccttaatgatggcgataacggagaagatattccctatagctatcaacgggaaggttttgctgacgggcaactggtcggtgaagacgatccttggcgttttgtctggatgaccagtcctgatggcaaatatcgcatcgttgttggccaggaatgggaataccgtgaagacatggcgctggcgattgttgccgggcaattgatcccgtggctggtcgcactgccgattatgttaatcatcatgatggtactactgggtcgtgaactcgcgccgctgaacaaactggcgctggcactacgtatgcgtgaccctgacagcgaaaaaccactaaacgcgactggcgtacccagcgaagtgcggccactggttgagagcctaaatcaactgttcgcccgcacacatgcgatgatggttcgtgaacgacgctttacctccgacgcagctcacgaacttcgtagcccgttaacggcgctgaaagtgcaaaccgaagttgcgcagctctctgacgatgatccgcaggcgcggaaaaaagcactgctccaattacattccgggatcgatcgcgctactcgtctggttgatcaactgctcacgctaagccggctggacagtctggataaccttcaggacgtcgcggagatcccgcttgaagatctcctgcaaagcagcgtgatggatatttaccacacggcgcagcaggcgaaaattgacgtgcgactgacactcaatgcccacagcatcaaacgcaccgggcaaccgctattgctaagtttgttggtgcgaaatttgctggataacgccgtgcgctacagtccacagggcagcgtggtagacgtcacgctgaatgctgataatttcatcgtgagggataacggccccggtgtgacaccagaggcactggcgcgaattggcgaacgcttctatcgcccacccggacaaaccgctaccggcagcgggcttgggctaagcattgtccagcgaatcgccaaattgcatggcatgaatgttgaatttgggaatgcggaacaaggtggatttgaggcgaaggtaagctggtaacttctctgtctatgagagccgttaaaacgactctcatagattttattaatagcaaaatataaaccgtccccaaaaaagccaccaaccacaaaccagacaaataccgaggctgaatacatatacccaaaactcgaacatttcccgcataaagagttttcttaagataagaataataagtggcgtaagaagaaaaaatgctgcaatcattgcttgcaatatacgatcttcgccactaacggaaggtatactgcaaatatttcctccgctctcaagcatccagtcatacttattgaaagcaaaaaaagaatctattaaccaataagtaagcattatatatagcaatgcttcaaatattgttttaattttctgctttaacatatatcagtacgctcataaaaatccatttataattatcaacatgacacgttgatactttcatcttttacttattcaaagccatattttcaatccccaaaaaaaccgaaccaaacgtgtaaattattccggtgcgagtaagaattatgaggaatggctatcagtattgtcattttcagaaaatatttatcctgcatcggtgagtcagagtaagatcagacttttgctaaattcgcaaaagactttgcacattttgctaatttcaccgtaccgctctgtgacgtactatagtcggcaaacgtctcaccttgaggttaaaaaatgagcaacatcctgattatcaacggcgcgaaaaaattcgcccactccaatggtcaactgaacgacaccctgaccgaagtcgcggatggcacactgcgcgaccttgggcatgatgtccgcatcgttcgcgccgacagcgactacgatgtcaaagcggaagtacaaaactttctctgggctgatgtggtgatctggcagatgccaggctggtggatgggcgcgccgtggacagtgaaaaaatacattgatgatgtattcaccgaaggtcacgggacgctgtatgccagcgatggtcgtacccgcaaagatccgagcaaaaaatacggttccggcggcctggtacagggcaaaaaatatatgctttctctgacctggaacgcaccaatggaagccttcaccgaaaaagatcagttcttccacggcgttggcgttgacggtgtgtatctgccgttccataaagcaaaccaattcctcggtatggaaccgctgccgacatttatcgctaatgacgtgataaaaatgcctgatgttccccgctatactgaagaatatcgcaagcatcttgtggaaatttttggttaactagagctcaggctttagaaggagttaaccatgcttaccgtaatcgcagaaatccgtactcgtcctggtcaacatcaccgtcaggcggtattggatcagtttgctaaaatcgttccaaccgtactgaaagaagaaggttgccacggctatgcgccaatggtggattgcgcagctggcgtgagtttccagtctatggcaccggattctatcgtgatgattgagcagtgggaaagcatcgcgcatcttgaagcgcatctgcaaaccccgcacatgaaggcgtatagcgaagccgtaaaaggtgacgtgctggagatgaatatccgtattctgcagccagggatttaatcctgccttgtttgcccggccatcctgaccgggcaatgttctttcctttaaacctcaatctccgccatgtcgcctttctcttgcaaccagttgcggcgatcttcgctgcgtttcttcgccagcagcatatccatcatcgcgtcagtacgctgatcgtcttcatcatcgatagtcaactgcaccagacggcgagtgttcggatcaagcgtggtttcgcgcaattgcatcgggttcatttcccccagacctttaaaacgctggacgttcggcttgcctttcttgcgttttaattgctcaagtacgccctctttctcttcttccgtcagcgcgtaataaacctctttcccgagatcaatacggtagagcggtggcagtgcgacgtaaacgtgaccgtgtttcaccaacgcgcggaaatgttttacgaacaaagcgcagagcagcgtggcaatgtgcagaccatcagagtccgcatccgcgaggatacagattttgccataacgaagctggctcagatcgtcgctgtcaggatcgataccgatcgctacgctaatatcgtgcacttcctggctagccagcacttcgtcggaagagacttcccaggtgttaaggatcttacctttcagtggcatgatcgcctgatattcgcgatcgcgcgcctgcttggcagatccgcctgcggagtcaccttccacaaggaacagctcggtacggttaaggtcctgcgcggtacaatcagccagtttgccaggcaacgccgggccgctggtcagctttttacgcaccacttttttggccgcacgcatacggcgctgggcgctggaaatcgccatctccgccagcagttcagccgcctgaacgttctggttcagccacaggataaaggcatctttcaccacgccagaaacgaatgccgcgcattgacggctagagagacgctctttcgtctgcccggcaaactgcggatcctgcatttttacactcagcacataggcgcagcgatcccagatatcttccgcgctcagctttacaccgcgcggcagaatattgcggtattcacagaactcacgcatcgcgtccaacaggccctgacgcagaccattaacatgggtaccgccctgcatcgttgggataaggttgacgtagctttcggtcagcagttcaccgccttccggcagccacagtagcgcccagtccacagcttcagtatcaccagcgaaattaccgataaacggtttttccggcagcgtcggcagaccatttaccgcttccgccaggtaatcattcagaccgtcctgatagcaccagcgttgttcggtattgttgatctcatctttaaaagtgatctcaacgccagggcacaataccgctttggctttcagcacatgcgtcaggcgactaacagaaaatcgcgggctgtcaaagaaggtttcatccggccagaagtgcacactggtaccagtattgcgtttaccgcaagtgccgacaacctgtaaatcctgcaccttttcgccattttcaaaggcgatgttataaacctgaccatcgcggcgcacgttaacttctacgcgcttgctcagggcgttaaccacgctaatccccacgccatgcaggccgccagagaactggtaatttttgttagagaatttaccgcctgcatgcagacggcaaagaatcagttcaaccgccggtacaccctcttccgggtgaatatccaccggcatcccgcgcccatcgtcaataacttctaagctctggtcagcatgtaaaataacgtccacgcgttttgcgtgacccgccagtgcttcatccacactgttatcaatgacttcttgccccaaatggttagggcgagtggtatcggtatacatccccggacggcggcgaaccggctcaagcccggtgagtacctcaatggcatcagcgttataagtttgcgtcatggtttaagttagtaattcgagttgatcgtcagagatggtgcagaccaagaaaatcgacgatcgggttgaaataatcttcgaagcccgtgaatgcgtggttgccgccttctatgacagtctggcggcaggaagcgtagtacgccaccgcctggcggtaatccagcacttcatctcccgtctgttgcagcagccagatcaaatccggcgcttccagcgggtcaatctgcatgactttaagatcgtaaatatggcgactctctagcacatattgctgcccggtgtaggggttctcgttctgaccgagatagtccgtcagcagttcaaacgggcgcaccgccgggtttaccaccactgcgggcagcataaaacattgactcaaccaggtggcgtaatatccccccagactgctaccgacaatacccaggctatcaccgccatgttccaggacaatggattccagcagctctgccgcgtcggaaggatacggcggcaactgcggaatgatcatctcaacgtcagggtgatgttccgccagccagttttttaacaagctcgcttttgcagagcgcgggctgctgttgaaaccgtgtaaataaagaagcgtagacatcagtagccttcactagcggtatcaggttggaaacgtgtgtccgccaggcgatgcacctcggtggtcagcgtgccatcagcatgtaactcgagagtacgccagccgggcgcgatggtatccagcgtaaagttggaacagtgcggcttaaactgcacacaggtgctcggcgttgccagcaggcggcgaccattccagtcgagatccagctcctgatgaatatgaccgcacagcaagtatttgacgtgcggaaacttcgccagcacggtatccagttcgcccgcgttacgcagactgtgttgatcgagccaactacaacccgcaggtagcggatgatgatgcagcagcagcaacgtatggcgttctggcgcatcggccagtttacgttccagccactcaagctgaaactcgctcagctcaccgtgcggcacgccaaacacctggctatccagcaacaggatttgccattgctcaccaataaacacgcgcttcgccggggagatacccgcatcctgtaacgcgctgtacatcgcgggctggaaatcgtggttgcccggcagccagacgcagggcgcacgaaaacttgcgatgccttcagcgaaatgctgataggccgcagaggattgatcctgcgctaaatcacctgtcgcgacaatcaggtcgaattcgtgctggtgtggccgaatcgcctccagcaccgcctggtaactctcccaggtgtttacccctaacagggcttcgtgcttttgtgcaaacaggtgagtgtcggtaatttgtaaaatcctgactctggcctcaccagccagaggaagggttaacaggctttccaaatggtgtccttaggtttcacgacgttaataaaccggaatcgccatcgctccatgtgctaaacagtatcgcaaccagtccgctaaaaactgattaatttgatgcttttcgtcgcgttgatgcaactttttattaggataatcataccgcgctttgaagcgaaaaatctgctggctactacacacttcagccaccatcgcgtcatgatacagacgcaccgtcatactcggaaggctccagtaactgatcgcgggcgcagtctgttctattgtcaccagggtagtgtatcgggtgctttccacaatcgtcagccgatattgtgcgtttgccacctgatagcttacagtttcgccgggtgcgtcattgcgcggtaacaaacggcgcaattgactaaagttcatctcgcacaggcgcatcatttcaggaaagtcaggtgtgtaacgcttcatttatgcccactcattttttaacgcttgatgatgcagctgcagccattgcaaagcgatgacgctcgctgcgttgtcgattttcccctcttctacccactggtatgcctgttcccggcttaccacatgaacgcgaatatcttcgttttcatcagccagaccgtgaataccgcttgcggtcgtggcgtccacttcgcccaccataatactgctacgctcactggtgccccccgggcttgccaggaaacttaacaccggtttggtccgtttgactatcagtcccgcctcttcaatcgcttcgcgacgggcaacatcttccacactttcaccctcttcaatcatcccggcaaccatctccagtagccaaggggtttcgctggtgtcgtacgcggcaatccgaatctgctcaatcagcacaacttcatcacgcactgggtcaaagggtagcaagactgcggcgtgaccgcgctcaaaaatttcccgccgcacctcatgactcatttgcccgttgaatagacgatgacgaaatctataaagatctaaactaaaaaagccgcgataaagtgtttctcgtgcaataatttctacatcgtttttgccaaatgtaacgggcaggttgtctggcttaagcattgttaatgtcctggcactaatagtgaattaaatgtgaatttcagcgacgtttgactgccgtttgagcagtcatgtgttaaattgaggcacattaacgccctatggcacgtaacgccaaccttttgcggtagcggcttctgctagaatccgcaataattttacagtttgatcgcgctaaatactgcttcaccacaaggaatgcaaatgaagaaattgctccccattcttatcggcctgagcctttctgggttcagtagcttgagccaggccgagaacctgatgcaagtttatcagcaagcacgccttagtaacccggaattgcgtaagtctgccgccgatcgtgatgctgcctttgaaaaaattaatgaagcgcgcagtccattactgccacagctaggtttaggtgcagattacacctatagcaacggctaccgcgacgcgaacggcatcaactctaacgcgaccagtgcgtccttgcagttaactcaatccatttttgatatgagcaaatggcgtgcgttaacgctgcaggaaaaagcagcagggattcaggacgtcacgtatcagaccgatcagcaaaccttgatcctcaacaccgcgaccgcttatttcaacgtgttgaatgctattgacgttctttcctatacacaggcacaaaaagaagcgatctaccgtcaattagatcaaaccacccaacgttttaacgtgggcctggtagcgatcaccgacgtgcagaacgcccgcgcacagtacgataccgtgctggcgaacgaagtgaccgcacgtaataaccttgataacgcggtagagcagctgcgccagatcaccggtaactactatccggaactggctgcgctgaatgtcgaaaactttaaaaccgacaaaccacagccggttaacgcgctgctgaaagaagccgaaaaacgcaacctgagcctgttacaggcacgcttgagccaggacctggcgcgcgagcaaattcgccaggcgcaggatggtcacttaccgactctggatttaacggcttctaccgggatttctgacacctcttatagcggtagcaaaacccgtggtgccgctggtacccagtatgacgatagcaatatgggccagaacaaagttggcctgagcttcagcctgccgatttatcagggcggaatggttaacagccaggtgaaacaggcacagtacaactttgtcggtgccagcgagcaactggaaagtgcccatcgtagcgtcgtgcagaccgtgcgttcctccttcaacaacattaatgcatctatcagtagcattaacgcctacaaacaagccgtagtttccgctcaaagcagtttagacgcgatggaagcgggctacagcgtcggtacgcgtaccattgttgatgtgttggatgcgaccaccacgttgtacaacgccaagcaagagctggcgaatgcgcgttataactacctgattaatcagctgaatattaagagtgctctgggtacgttgaacgagcaggatctgctggcactgaacaatgcgctgagcaaaccggtttccactaatccggaaaacgttgcaccgcaaacgccggaacagaatgctattgctgatggttatgcgcctgatagcccggcaccagtcgttcagcaaacatccgcacgcactaccaccagtaacggtcataaccctttccgtaactgatgacgacgacggggcttcggccccgtctgaacgtaaggcaacgtaaagatacgggttatctgccgcattcttcccccttcagccttcaatttcgaccagccatcctctattctgatgggtatttaccactggtcccggaagacaaaaatgaaacggacaaaatccatacgccacgcatcgttccgcaaaaactggagcgcacgccatctgacaccagtcgctctcgcggttgccactgtttttatgctggctggctgtgaaaagagtgatgaaacagtgtctctctatcaaaatgctgacgactgtagtgctgcaaacccaggcaaaagcgccgaatgtaccaccgcgtacaacaatgcgctgaaagaagccgaacgtactgcgccgaaatacgccacccgtgaagactgtgttgctgaatttggtgaaggtcagtgccagcaggcaccagcccaggctggcatggcaccagaaaaccaggcgcaggcccagcaatccagcgggagtttctggatgccgctgatggccggttacatgatggggcgtctgatgggcggcggcgcgggatttgcacagcagccgctgttctccagcaaaaacccagccagtccggcttacggtaaatataccgacgcgacgggtaaaaactatggcgcagcccagccaggccgcaccatgaccgtaccgaagacggcaatggcaccaaaaccggcgaccaccactaccgttacccgtggcggttttggtgaatctgttgccaaacaaagcactatgcagcgtagtgcaaccggtacctcttctcgtagtatgggtggctgataccgatggaaagagtcagtattaccgagcgcccggactggcgtgagaaagcccacgaatacggtttcaattttcacaccatgtacggcgagccgtactggtgtgaagatgcttactacaagttgaccctcgcccaggttgaaaagctggaagaagtcaccgccgaactgcaccagatgtgcctgaaagtggtggaaaaagtgatcgccagcgatgagctgatgaccaaattccgcattccaaaacacacctggagttttgtgcgccagagttggctgacgcaccagccaagcctttatagccgtcttgatctggcgtgggatggcactggtgaacctaaacttctggaaaataacgccgatacgccaacgagtctatacgaggcggcgttctttcagtggatctggctggaagatcagcttaacgccggtaacttgccggagggcagcgaccagtttaacagtctgcaagaaaaactgatcgatcgcttcgttgagctgcgtgaacagtatggcttccagttgctgcatctcacctgctgtcgcgacacggtggaagatcgcggaaccattcagtatttgcaggactgcgcaacggaagctgaaattgctactgagttcctctacatcgatgatatcgggttaggtgaaaaaggtcagttcacggatttacaggatcaggtaatttccaacctgttcaaactgtatccgtgggaatttatgttgcgtgagatgttcagtaccaagctggaggatgcaggcgtacgctggctggaaccggcgtggaagagcattatctccaacaaggcacttctaccgctactgtgggagatgttcccgaatcacccgaacctgctgcccgcttattttgcggaagatgatcatccgcaaatggaaaaatatgtggttaaaccgatcttctcccgtgaaggcgcaaacgtgagcatcattgagaacggcaaaaccattgaagcagcggaaggtccgtatggcgaagaagggatgattgttcagcaattccacccgttaccgaaattcggcgacagctatatgctgattggtagctggctggtgaacgatcaacccgccggaattggcattcgtgaagaccgtgcattgatcacccaggatatgtctcggttttatccacatatttttgttgaataagccacgataccggatggcactcgccatccggtaattgttagcctatctgcacgctcagcatactcaggctgcccatttctataccctcaaccggaatggtaattggctcctgcccatcccacgcacctaacacatacaacaacggcaaataatgctctggcgttgggttgcttaacgtgccaccttcatggtcgaggtaattcaccagaggatgttgttccactggcccttgccacgtcagattcgctttcacatactcattaaagctcgtcgcccacggatacggactactatcaccgtgccacttcactgtgcgcaggttatgcaccacgttaccgctggcgaccaacattattccttcatctcgcagcgctgccagtttgcgccccatttcgaaatgccaggcggcaggtttgctactgtcgatactcaactgcaccatcgggatatcagcgtcaggatacatcttaatcagcacgccccagctgccgtggtcaaagccccaggcttctttatccagcgtcaccgggatcggcgctaacagctcaaccagacgctgtgccagcgcagggctacccggagcaggataatgcgtatcgtacagcgcctgcgggaagccaccaaagtcatgaatcgtgggcggcgtctccatcgcggtcactcctgttccacgggtaaaccagtgagcgctaaccaccacaatcgcttgcgggcgtggcaatgtcatccccaacttctgccagctgcgggtatacaaattatcttccagcacgttcatcggactaccgtgacctaaaaacaatgctggcatacgtgtactagacatgatgatatccttaactaaaggtgtcattttgatatcctcacaatacgcttgttcggcggagtaagaacccggataacaatgatgatgatcatcagttattttgacgatctgcctgaaggtgaagatttataaggagttgtcgatgagtgtacctctcattctgaccatactggcgggggcagccacgtttattggcgcgtttctcggcgttctcgggcaaaaacccagcaaccgcttactggcgtttagcctaggttttgcggcggggatcatgttgctcatcagtttaatggaaatgcttcctgccgcactagcagctgaaggaatgagccctgtgttgggttatggaatgtttatcttcggtctgcttggctattttggcctggaccgcatgttgccacatgctcatccgcaggatttaatgcaaaaaagcgtgcagccgttgccaaaaagcatcaagcgcacagccattctgctcactctcggcatcagtctgcataacttcccggaagggattgccacctttgtcacggcgagcagcaacctggagctgggatttggcatcgcactggccgtcgcgttgcacaatatccctgaaggtctggcagtggcaggcccggtttatgcggcaacggggtctaaacgcaccgcgattctgtgggcggggatttctggactagcagaaattcttggtggtgtgctggcgtggttaatcctcggtagcatgatttccccggtggtcatggcggcaatcatggcggcggttgcaggaattatggtggcgctcagcgttgatgaattaatgccgctcgccaaagagattgaccctaataataaccccagctatggcgtactatgtggaatgagtgtgatgggattcagtttagtgctgctacaaacggcgggaattggttaaaaacaacatcagaagttgtccagcgcatggacaacttctgccagcttcacgaaagccttattctaccttttcggctgtctcttctctcgtactgtttaagtatttgttccgcgcttcaagcagtgcgtctctgtcctggcgaaacgcccgacaataacgtttcaaatgcaggaaataacccaccacaaccagagcaatcaatacaatccagtaccaggcgataaacatccttttacccttaatatttaacaatactaaacatttagcgtataaatttcacatatcctttttcggatatattcatatggtcgcataataacggaacaattatatgattttgatcataatgaaaaagaatgcctgatattaatgaaattttctcatagaaagagaagcggaattaacatcttgcatagcagggaaaaataaaaaccgaagcctgctacaacttcggtttcttgattaaggcagtaaattaagcagcggttttcagctggctttacgctcatgtgcctgacggtatgccaccaggtcttcaatagtcacgagcgccatattgtgtttattggcaaactcaatacactctggtgcacgcgccatcgtgccatcgtcattagtcagctcacacagtacaccagccggtttaaagcctgccagcgtcatcagatcaatagttgcttcagtatgaccgccacgcgtcagtacaccacctgcctgagcgcgaagtgggaaaacgtggccaggacgattcagatcactcggttttgcgccatcggcaatcgctgcgcgaacggtcgtaatacggtcagcggcagaaacaccggtagtcacaccttcagctgcttcaatggtcacggtaaaaccggtgccataggcgctggtgttattttctaccatcattggcagatcgagttgtttacggcgatcttcagtaatgcacaggcaaacaataccgctaccgtggcgaatggtcagcgccatctgctcaacagtcatggtttctgccgggaagatcatatcaccttcgttttcacggtcttcatcatcaagcaccattacaccgcgtccttcacgcagcgcagccagtgcattttcaacacgttcgaaaggcgtaccaaaagaggaaagtagcgtctgattcatggtaaaaaaacctcactaaaattatggttaccagaatcagggcagtcttaggagtggcggcatatagccaaaataacgtgagcgggtccatgcccgacagaatcgttactctctcccatccggactctaaccgtcggccccggaattacaccggatctgctgtcctttgagttcgcacccaaagcgctcgcgggctttcaactgagttgatttaccgccggtggggaatttcgccccgccctgagaataagcggattcactataacgctaatgattagcggcagcaacgcatagcttcacataattctggtttatatctaatacaaacactaaaacgggccatcaggcccgttatatcagtgctctaactccagctctcttgcctgcatcatctgttgacaataccaggcataacgtgcgcaaaaccaggttctatgttcttcatccatgttaccagtaacggccagaatatcgaccgggcgaccttctgcgtgcattctggcaaaactacgcgccaggaaatcgaaattatttaaagaattaagactatgatccataagcacatcctccggttatcgcataccttttaaggccatatgctttttctgatttcagtattccccaatcagtgtagtgcctttaaacataacgtgcgtaaatatattgtccccgatcacactttttagtgaaaaataaaaaaccatattaaaagactttctcttccagaacttctctaacctgtgttattattaacacagataaatgtaagcaaggaaactattacaaagtaaatattgcgtcactaaatggacattggagtgatatatgattttattcgccgactataacaccccttatcttttcgctatttcctttgtactgttgatcggcctgttagaaatttttgcgcttatctgcggtcacatgctctccggtgctcttgatgcacatcttgaccattatgattctataaccacaggtcatattagccaggcacttcattatctcaatattggaagattgccagctctcgtcgttctctgcttactggctggtttttttggtcttattggcatcctgttgcagcatgcctgcatcatggtctggcaaagtccactgagcaacctgttcgtggttcctgtcagtttactgtttacgattattgcggtgcattataccggtaaaatagttgcgccctggattccacgcgaccatagtagtgctattacagaagaagaatatattggtagcatggcgttaattaccggtcatcaagccactagtggtaatccctgcgaaggaaaactcaccgatcaatttggccaaatacattatttactactggagcctgaagaaggaaaaattttcactaaaggagacaaagtgttaattatttgccgactttctgcaacgcgatatttggcggaaaataatccctggccccaaatattgtaatttattaatcaaaaggaaatttaataatggatgatattgttaattctgtgccctcctggatgtttaccgcaattattgccgtatgcattctgtttattattggaattattttcgccaggctctatcgtcgcgctagcgcagagcaagcttttgttcgtactggtttaggtgggcaaaaagtggtaatgagcggtggcgcaatcgtgatgccgatctttcatgaaataatccccatcaatatgaatactctgaagctggaagtcagccgcagtaccattgatagcctgattacgaaagatcgtatgcgcgtcgatgtagtagtcgctttctttgtgcgggtaaaacctagtgtagaagggattgccaccgctgcccagacgctggggcaacgcaccctgagccctgaagacttacgtatgttggttgaagataaatttgtcgatgccctccgtgcaacagctgcgcaaatgaccatgcatgagttacaggatacccgcgagaactttgtgcagggggtgcaaaatacagtggcagaagacctgagcaaaaacggtctggaactggagagcgttagtcttaccaactttaaccagaccagcaaagaacatttcaatccgaacaatgcctttgacgccgaaggtttaaccaaactgactcaggaaacagagcgccgtcgccgcgaacgtaacgaagttgaacaggatgtagaagttgcggtgcgtgaaaaaaatcgcgatgcgctaagccgcaagctggagattgaacagcaagaagcgtttatgacgcttgagcaggagcagcaggttaaaacccgtactgccgaacagaatgcacgtattgcggcttttgaagctgaacgtcgtcgtgaagcagagcagacacgaattctggctgaacgacagattcaggaaacagaaatcgaccgcgaacaggccgtccgcagtagaaaggttgaagctgaacgtgaagttcgcattaaagagatcgaacagcagcaggtcaccgaaatcgctaaccagacgaaaagcatcgctattgccgccaaaagcgaacaacagtcccaggcagaagcgcgtgctaatctcgcacttgcagaagcggtaagcgcccaacaaaacgtagaaaccactcgccagactgccgaagccgatcgtgctaaacaagttgccctaatcgctgccgcgcaggatgcagaaaccaaagcggttgaactgaccgtgcgggcgaaagcagaaaaagaagccgcagagatgcaggcggcggctatcgttgagttagccgaagctacacgtaaaaagggtctggcggaagcagaagcacaacgtgcgctgaacgatgctatcaacgtactttctgatgaacaaaccagccttaaattcaaactggccttgttgcaggcgctgcctgcggtaatagagaaatccgttgagccgatgaagagtatcgacggtatcaagattattcaggtcgatggtctgaatcgtggcggcgctgcgggtgatgcaaacacgggtaatgtggggggcggaaacctggcggaacaagcattaagtgccgctctctcttaccgcacacaggcaccgctgattgactccttgctcaatgaaattggcgttagtggcggcagtctggcggcattgactagtcccttaaccagtacaactcccgtcgaagaaaaagcagagtaaaccctcttccaggaataatccctggcccaaaaagccggggattttttatatctgcgttccgctaaaaagtgcaaatgatcaggttgttgcagcattttgcgtgacggctcggggaaggcaaaactgcatcagagaaagcattgcgtggggtctggcgctcatcaacaatcggggagtcagcagggggctgaaacgggaaagcccctcccgaagaagggggccttacagaaggaaagggttatgatgaagctcgtcatcatactgattgtgttgttactcgtaagtttcgcagcttattaacagccaatcagaggggggagaaatcctccctcacccttgttcctttactttaggttgaaaaaaaatcagcgtcaagaaggtttcattaacacatatccctggcccaaaaagccggggattttttatatctgcgttccgctaaaaggtgcaaatgctcaggacgttgcagcgttttgcgtgaccgctcggggaaggcaaaattgcctctgggaaagcattgcgcggggtccggcgctcatcaacaatcggggggcagcaaggggctgaaacgggaaagcccctcccgaagaaggggccttgtataaggaaagggttatgatgaagctcgtcatcatactggttgtgttgttactgttaagtttcccgacttactaacaactcatcagaggggggagaaatcctcccttacccttgttcctttactctaggttgaaaaaacaacagcgtcaataggcctgccatgtacgaagcgagatctgtgaaccgctttccggttagccttttttatcctgttggatcttcttgatgatgttggtcgtgctgcaaccgtcttcaaagttgagcaccaacacttcgccaccgttggcccagacttctttactcccggcaatctcttctggtttatagtcgccgcctttcaccagcagatctggcaagatcccggcgatcaagcgctgcggcgtgtcctcttcaaagctcactacccagtcgaccgcttccagtgcgcccagcacaatcatacgctgttcgagtgggtttaccgggcgggaatcccctttcagccgtttggtggaggcatcgctgttgacggcaacaatcaagcggtcacccagcttgcgggcatttgccagataagagacgtgcccggcgtgcaggatgtcaaagacaccgttggtcatcaccactttttcaccacgtttacgcgctgccgctacggccagcttcagttcctcttcggtcatcacgccaaagcctgtatctgcacgtccacgtacagcattttccagctcgatcgggctaaccgtggaggttcccagtttgccgaccaccacgccagccgccgcattggcaaagaagcaggcttcttccaggctattacccgctgccagcgttgccgccaggacgccaatcaccgtgtcgcccgcaccggtaacgtcatacacttcctgcgcttgggttggcatatgcagcggcgctttacccggttgcagcaggctcataccctgttcggaacgggtcactaacagagcgctgagttcgtaatcggcaatcagtttcatgccgcgctcaacaatctcttcttcggtcttacatttaccgacaacagcttcaaattcgctgagattcggcgttaacagcgtagcgccgcggtagcgctcaaaatcggtaccttttggatcaatcagcaccggaacacccgctttacgcgccagttggatcatctgctgtacgcttgccagcgcacctttggcgtagtcagaaagcaccagcgcgccaatgctactcagcgcctgattaatccgctcgtgcagcggctgcggatcaacaccttcgaaaccttcttcaaaatccagacggatcagctgttggttgcgggaaagtacccgtaatttggtaatggtcggatgcgtcggtacagaaacgaagtcgcatttgacgttgacgtcggccagagatttactcagcgcgcgcgctgcatcgtcaatgcccgtcaacccgaccaggcgtgcattagcaccgagagaagcgatattcatcgccacgttagccgcgccgcccggacgttcttcgatggtattcactttaaccacgggcaccggcgcttccgggctgatacgactggtggggccgtaccagtaacgatccagcatcacatcaccaaccaccatcactcctgcacgttcaaactctggcagcgttactttcattcctgtctcctgagagattcaaaatttgcgcgcgataataccatacttcattcttccaccagccacttctgccagcttgcccgcaccagttcacgctctgcggtgaagcaatcctcgctcacatggcccggcaattcctgtaatgccagatgatgaagttcatcgcgaagcgtagtgtaagcacgggtcagcgccatcgcttcctgctcttccataatgtcgttttgcgccagtagttccagaatacgcacgttgtcactccagcgcgttaacttcggtttttcatgagcgtagcgcaacaccagatattgggtaataaattcgatatcggtaattcccccttcatcagctttgatatcaaagcgatcgcgatgtttattgccgagatgagcgcgcattttctcgcgcatttcccgcacttccgtttgcagagttttaccttcacgcggcagcgtcataatctcgcgacgcactgcgtcaaagtgcgcggtgagctgcggatcgccgtacactacacgcgcacgcaccagcgcctgatgttcccacgtccaggcctcgtttttctgataatcggcaaatgcttctgcggatgtcaccagcattcccgccgccccggacggacgcagtcgagcatccacttcatacaaaatgccggaagaggtacgcgtactgaacagatgcataatgcgttgcgccagacgcagataaaactgccgcccgtcgatttcccgctcaccgtcagtcatcgcatccattgggcaatcatggaggaagataaggtcaagatcggaactgtagcctaactcccagccgcccagcttgccgtagccgaccaccgcaaaaccacgcccttcgcgttcgttcaggtgattcggcttaccgtagcgggcaaccatttgaacccacgcctgctgaacgacggcatctatcatggcttccgccagccaggttaagtgatcgctcactttcatcaccggtagcgtaccggcgatatccgctgcggcgatgcgtaacagctgcgcctgtttgaactgacgcagcgcctcaagctgttgctcttcgtcatcttccggcacgcgcagcaaatactggcgcaactcatcgcggtaggcatcggtcgccgtcggctggtaaagggtgtttggatcgagcaattcatccagcaataatggataacgcgccagctggctggcaatcatcgggctcgcggcacacagagaaatcaaatgtttaagcgccgcggggaattcactgagcaattctaaataggtggtgcgggtaacaatccccaccagcaaggcggtaatgcggctcagcgtaacggcagcgtcttcacgcgcacagacatcacttagcagatgcggcatcagatggtcgagcacctgacgtcctcgcggcccgatggtgcgcttatccagctctttgcggaaatcggcaatcagcgttagcacctgtttgcgatcatcctcgctaagatgcgccagcactggcgtagtgtcatcttcctgcaacgcatcctgccacagctcacgccactgttcgctcaggctctcttcctgagtttcactttcatcgtcgccaatcaattcattaaacacccggcgcacattggtcatatgtgcggtcagcgccccggtcagttgcggccagtcagcaaagtccatcgcccacgccagccgcgcacgattaagctcatcagaaggaagcgtctgggtttgttcgtcgttaatgctttgcagcaggttttccagacgccgcaggaacagatacgccactcgcaattgttcagcatcgttttcagaaagcagatgcagctcggcaatggcgctgagcgttggcagtaaagagcggctttgcaggctcggttcgcgtccgccgcgaatgagctggaacacctgaacgataaattcaatttcgcgaatgccgcctgcgccgagtttgatattgtcggtcaaaccacgtcgacgcacttcacgggcaatcatccctttcatgttgcgcaggctctgaatcacgctgaaatcgatgtaacgacggaaaacaaacgggcgcagcatcgcacgcaactcgttagcatagacgccttcgctatcgcccataatccgcgccttgaccatcgcgtaacgctcccagtcgcgcccctgctcctggtaataatcttccaacgcggcaaagctcagcaccagcgggccactttcgccaaacggacgcagccgcatatccacgcgatagacgaagccatcctgcgttggttgatccagcactttaatcagccgctgccccatgcgggtaaaaaactgcgcgttatccagttcccggcgtccaccctgcgtacaaccatgttccggccaggcaaaaatcagatcgatatcagaggagaaattcagctccccaccgcccagcttacccatgcctaaaatcagcagcggttgcgcttcgccctgcgcattgcacggcgttccccactcgcggcagcaggcgtcatacagccagtcacgcgccgcaacaatcagcgtctccgccagatagctgagctgctgcaatatgctctcttcagtaaccagtgccagcgtttgcgcccaggcgatgcgcaccataatgcgccgccggaatagccgcagctcgcgcattaacccggcttcgtcactcacattacagagcgcctcctgcaaccatgccgcgtaatgctgccattcgtcggcctgcggcggttggctttccagttccgtcagccactctggatgcgcaatcacgctgtcctgcacaaaatcactaaaagtaagtacactcttcgcctgtgcgctaagactttcctcggctaaaggctctggcagccgctcaacaacggtctgccagtactgctgtaacggactagagagcggcttcataagcgattttatccttgcctgattaacgttttccgctgtgcaaccagaacggttcctgattgtttgcctcattacggaaatgttcaatttcgatgcgttgcccggtcgcaatagcgtgatgcagcccctgccagttctccagccaggcttgcgcgacgacaggatcatagtaacccgccagcaacagtatactgtcaatatcacgcgtcaggcgtggcaactggtcacggtagcgatcgcctaacggctggcagaaaacgcttttcagttcagcggcatggcgggaaagatggatatcggcaaagcgtttgaaggagtcgctgattttgccctgcgctttggcatctaaaaatggctgccatgctttgcttaccaaccattcggtcaacgccagcttcgccattgccgtttcggtagagtagaccgccgtcacggcagacaccgcagaagcaatggtcgcctcgcattgagtcagcagatcacgtaagtgagtgctcgctttacgcggcacaataccaccgaacagcatcagcgtatgacggaccaggctaatggctgccagcacctgttctttcgccgcatcgttgccgcgtacccacagttcttcatgatactgccattgcgctaacgccagctcgagcgccgcttccagcccctgttccacatcggcttttgccgcaacatgcaaaatggtggtcggtttgatttcacgcgccggattgccctgcgccagatgatagccacgcgccgctttgctcaggctgccctggcgtaatccggtttggcttaccagttggttcgccagtttcagcaccgcgcgcgtgtcgccgctaagcagttccagttccagctcacagataggttcagcaaattcacccgctttcacttccccctggtcgagggcgatttcaatttggctaccatcgaccgccaccagccatttttcgcgataaaaatcggtgctgaacagcggctgcacgcgggaggcgagatcggcgggcaattcgccgttcggccagacttccgtcggtaactgcgccaggtcgagcgtcggttcgctcaacgccacgttatattccgggcgctgatgtaagccgcctgtcactcttcctgcaactttcatggtcatctcatagcgaccgttttcgccacgaatacgtaagcccatatcgtgcccacgcagccagttatccggcgtttcgtagtaaatattcagcaactgcacggggtcatggtgctcgccgcccagcgtattgagatggtcacgcaacgcctcaacggcactgtgattaacaataaactttaattcgatttcctgagccatggcctttacttatcggttatgtcacataagtgacgatgaacggcgaacttaatgcgatcttttttgtcagtagatagtattttgcgccaaattgccatgcaacgggcaatttgacgggcgtaaaagtttgaagcagtggcaagacctgacacagaggattccgattgatgtcgaatgctttgcgtagcgacactgatgccactactatcgttccactttccatgacaataacgacagcctgatgccaaaattacgcctgatcggattaactttactcgcacttagcgcgactgccgtcagtcacgctgaagaaacgcgctatgtttccgacgaactgaatacctgggtccgcagcggtccgggagatcattatcgcctcgtgggcacggttaacgccggcgaggaagtgaccttattacaaactgacgccaacaccaattatgcccaggtgaaagacagctctggccgtaccgcctggatcccgttgaaacaacttagcactgagccaagcctgcgctcccgtgtgccagatctggaaaatcaggtcaaaaccctgaccgataaactcaccaatatcgataacacctggaatcagcgcaccgcagaaatgcagcaaaaagtggcgcagagcgacagcgtgatcaacgggttaaaagaagaaaatcagaaactgaaaaacgagctgattgtcgcgcagaaaaaggtcgatgccgccagcgtacagctggatgacaaacagcgcaccatcatcatgcaatggtttatgtatggcggtggcgtgctggggcttggcttgctgctcggtctggtactgccgcacctgatcccaagccgcaaacgcaaagatcgctggatgaactaaatcgccttcttcgttgcactgtcttattattaggaattgtgtatttgacgaagggatgatggcgtgaagatttatctggtcggtggtgctgttcgggatgcattgttagggctaccggtcaaagacagagattgggtggtggtcggcagtacgccacaggagatgctcgacgcgggctaccagcaggtaggccgcgattttcctgtgtttctgcatccgcaaacgcatgaagagtatgcgctggcacgtaccgaacggaaatccggttccggttacaccggttttacttgctatgccgcaccggatgtcacgctggaagatgatcttaagcgtcgcgatctgaccattaatgcgctggcccaggacgataacggcgagattatcgacccgtacaacggtctgggcgatctgcaaaatcgtctgttgcgccatgtttcccccgcttttggcgaagatccgttacgcgtattgcgcgtggcgcgttttgctgcgcgttatgcccacctcggttttcgtattgccgatgaaactctggcgttgatgcgcgagatgacccatgcgggtgaactggaacacctgacgcctgaacgggtatggaaagagacggaaagcgccctcaccacccgcaatccacaggtgttcttccaggtactgcgcgattgcggcgcactgcgcgttttattcccggaaattgacgcactgtttggcgttccggcccctgccaagtggcatccggaaatcgatacgggtattcataccttaatgacgctcagtatggcggcgatgctgagtccgcaggtcgatgtccgtttcgcaactttatgccacgatctcggtaaagggctgacgccgccagaactctggccgcgtcatcatggtcatggcccggcgggtgttaagttagtggaacaactatgccagcgtctgcgcgtgccaaatgaaattcgcgatttagccagactggtggctgagtttcacgatctcatccacaccttcccaatgctgaacccaaaaaccatcgtcaaattatttgattccatcgatgcctggcgtaaaccgcagcgtgtcgagcaactggcgctgaccagcgaggctgacgtgcgcggcagaaccggttttgaaagtgcggactacccgcaaggccgctggttgcgcgaagcctgggaagtggcgcagagtgtgccgacaaaagccgtcgttgaagcgggatttaaaggtgtggagattcgcgaggagctgacccgacggcggattgcggcggtagccagctggaaggaacaacgttgcccaaagcctgaatgagtattgggcattttgccggatgcggcgtaaacgccttatccggctacatgtcaacgacagttgtaggcctgataagacgcgcaagcgtcgcatcaggcgttgattgccggatgcggcgtgaacgccttattcggcctacgcaatcgttgacaacgccaagcatccgacactattcctcaattaaaagaacacgacatacaccgcagccgccacaataaagcgataaatggcgaacgggataaagctaatgcgcttaatcaattgcaggaaggttttaatcgctatcagcgccaccacaaaagcggtgataaacccaacggcaaacatcgggatatcgccgcttgtcaggaagccccagcttttgtagagatcgagcgccgttgcgcccatcatcatcggcaccgccagcaggaagctaaactcggaagcagcgtaacggctcacccccatcagcatcccaccactaatggtcgccccggaacgggagaaacccggccacagcgccagacactggaaacagccaatcataaatgcctgacgataggtcatatcatcaagacccggcgcacgcggctctttcggcttcaggcattcggcggcaatcagcaacaaaccgccaacgaccagcgcatacatcacatttatcgggttaaacaaactcttaatcgtgtcgtggaacaacagccccaataccaccgccggaatcatccccagcaaaatgtggatcagcgttaaacgacctttgctttcaccttcgtgctgcaacgggcggccaaagtggatgccaatcaggccaaacagacgccgccagaacatcactactaccgccagaatacttcctaactggatcacaacttcaaaggttttcgccgtgtcgccctcaaaccccaacaagtgaccgacaataatcatatggcccgtgctggataccggcagaaattctgtcaatccttcgaccacacccaatattgccgctatcagcaggctgtgcatatcgctcatcaataaacccctaaattattaaaatgtaccgcttgtccgaactactgcgtatgaccaggttataaccgtttggtttaacagctgtaaaattaattattttctttcagattattgccacgctcaatgattacgccaacattcgccgcccgcgccactgcgcctggcttgctgagtttgatacgcacccacgggctgttgaagcgtgctaacagcagctccgccacctcttcagccacgcgttccaccagcgcaaaacgcgccccctcgacgtggctgaccaccgtttctgcaatgtcagcgtaactgaggcaatccgccacatcatcacttttcgccgctttacggttatcccacgccatttcgatatcgaacactaacttctgttcgatggtctgttcccagtcgtaaacaccaatagtggtgattacgctaagttgctctataaatacaatatccatcacgtcctgcctgctttttggctaaccggataccacttccggcgaaatgtgcgtattatccacagattcatcgttgaacacgaattttcaaaacggaacagcttatgagtgcaatcgcgcctggaatgatcctcatcgcgtacctctgcggctccatttccagtgccattctggtttgccgcttgtgtgggctgcccgatccgcgaaccagcggctccggcaatccaggcgcaaccaatgtgttacgtatcggtggcaagggagcagccgtagcagtactgattttcgacgttctgaaaggaatgttgcccgtctggggcgcgtatgaattaggtgtcagccccttctggctaggcttaattgccatcgccgcctgtcttggacacatctggcccgttttcttcggatttaaaggaggaaaaggcgttgctaccgcttttggtgccatcgcacccattggctgggatctcaccggagtaatggcgggaacctggttactgaccgtgctattgagcggatacagcagcctgggagcgattgtcagtgcactgattgctccgttttatgtctggtggtttaagccacaattcaccttcccggttagcatgctctcttgcctgatcctgctgcgtcatcatgacaacatccaacgtctgtggcgtcgtcaggagacaaaaatctggacgaaattcaaaagaaagcgcgaaaaggatcccgagtgatttctggtggatttacatgacctgatagccttcatcgggcttgcccagccgttgctggcaccatgccgccagaaattccacgcagacacgtaatttcatgctgcgatagagcggctcccggtaaacagcccagatattggcgctttgtgcatactctggcaatacttgcaccagtttgccactctccagaaacggcaacacatcccactcggaacgcagcataatccctttgccctccagcgcccattgcagcacaatctcgccgctattggaggaaagatgcccgcttaccttcacgctttttttctcctgaccgttccccaactcccatattccatgggtcatatcgcgctctttggtcaccagacagtcatgacgacttaattcctgtagggattgtggctgcggatatttttgcagatactcaggtgctgcgcataatattcttttattttttgtcaaaagatgcgcaatataataatcaggaatttcgtcattaatacgaatatccagatcaatattatcctgcactaaatcaatttgccgatcgaacaattcaaaatgcacctgtaactcaggataattgcgcatcagttcggtaatagctggcgcaatatggctgcgcccaaaaccaaaactgcaaccaatacgaatcatcccctccgggcgcgttttgatttgcgtgacgtcatcgaccagtcgctgatattgggtgaggatttccaacgcatgttcgtaacaacgttggccactttcagtcagcgccacgccgcgagcggagcggttcagcagcgttgttgccagcgtattttcaaggatttggatccgcttggtgacaaatgcaggcgtctgcccaagcgtcgccgctgcggcgctaaaactcccgctgtgaacgatttctaccagtacctgcaagtctttggctaaaggccagctattcagcatcgttaattatccgcagttgtgataagcgcagtgtatttcgcaaaacattgccattccctgctctggcgcaatattcattcttattttcgcgttgattcacgaactgttaattacatattcacggtggcaaaaaatataaaaccacatttttagtggtagtttgtggcggtgaatttttccagacaaatacaaaaactggagttgccatgatgagcgaaagtaataagcaacaggcagtgaataagttgacagagattgtcgctaactttaccgccatgatttctacccgaatgcctgatgacgtggtggataaactaaaacagctaaaggatgccgaaacgagcagcatggggaaaattatctaccatacgatgttcgacaacatgcaaaaagcgattgacctgaatcgtcctgcctgtcaggacaccggggagattatgttcttcgttaaagtcggttcccgcttcccactgcttggcgagctgcaaagcatactcaaacaagccgtggaagaggcaaccgtcaaagcgccactacgtcacaatgcggtagaaatttttgacgaagtaaacaccggcaaaaataccggtagcggcgtaccgtgggtcacctgggacatcatccccgacaatgacgatgcggaaatcgaagtttacatggcaggcggcggctgcacgctacctggccgcagcaaagtgttaatgccgagtgaaggctacgaaggcgtggtgaaattcgtcttcgaaaatatctccaccctcgccgtaaacgcctgtccaccggtactggtgggcgtgggcatcgccaccagcgtggaaaccgccgccgtactcagccgtaaagccattttgcgcccgattggcagccgccatcccaatccaaaagcggcagaactggagctacgcctggaagaaggactcaaccgtctggggattggtccacaagggctgaccggcaacagtagtgtgatgggcgtacatatcgaatctgccgcccgccatccgagtaccatcggcgttgctgtctctaccggctgctgggcgcatcgtcgcggcacgctgctggttcatgccgatctcacctttgaaaatctgtctcacacccggagcgcgttatgaaaaagatcctgacaaccccgatcaaagctgaagatctgcaagatattcgcgtcggcgatgtgatctacctgaccggtacgctggtgacctgccgcgacgtttgtcaccgccgtttgatcgaactgaaacgtccgatcccttacgatctcaacggcaaagcgattttccacgctggccccatcgtgcgcaaaaacggcgacaaatgggagatggtctccgtcggcccgacaaccagtatgcgtatggaaagttttgaacgtgaatttattgagcagaccggcgtgaaactggtggttggcaaaggtggtatggggccgctgaccgaagaaggctgccagaaattcaaggcgctacatgtgattttcccggcaggctgcgcggtgctggcggcaacccaggtggaagagattgaagaagtgcactggacagagctcggaatgccggagagtctgtgggtctgccgggtcaaagagttcggcccgctgattgtctctattgatacccacggcaacaacctgatagccgaaaacaaaaagctgttcgccgaacgccgcgatcccatcgtggaagagatctgcgagcacgtccattacatcaaataaccctcccggagaggctcacccctctcctttttcgcaggcataacacgatgaaaccttccactgaatggtggcgatatcttgcgccgctggcggtcatcgccattattgctctacttccggttcccgcagggctggagaaccatacctggctctactttgccgtttttactggcgtgatcgttggactgatcctcgaacccgtgccgggtgccgtggtggcgatggtgggtatatccatcatcgccatactctctccctggctgctgttcagcccggagcagctcgctcagccaggctttaaattcactgcaaaatccctcagctgggccgtttccggtttttctaatagcgttatctggctgattttcgccgcctttatgtttggcacaggctatgaaaaaaccgggcttggacgccgcattgcgctgattctggtgaaaaagatgggacatcgcacgctgtttctcggctatgcggtgatgttctccgagctgatcctcgcacctgtaacaccgtccaacagcgcgcgtggtgcggggattatctatcccatcatccgtaacctgccaccgctctatcaaagtcaaccaaacgacagcagtagccgcagcattggcagctacatcatgtggatggggattgttgccgactgcgtgaccagcgccattttcttgacggcgatggcaccaaacttgctgttaattggactgatgaaaagcgcatctcacgccacgctgagttggggcgactggttcctcgggatgttgccgctcagcattttactggttctgctggttccctggctggcttacgtgctgtacccgccggtactgaagtctggcgatcaggtgccgcgctgggcagagacggaactgcaggcaatgggcccgctctgtagccgtgaaaaacggatgctggggctgatggtaggcgcgctggtgctgtggattttcggcggtgattatatcgatgccgcgatggtcggttacagcgtggtggcactgatgctgcttctgcgcattatcagttgggacgacattgtcagtaataaagcggcgtggaacgttttcttctggctggccagccttatcaccctcgccaccggactcaacaacaccggttttattagctggtttggcaaactgttagcaggcagcttaagcggttatagcccaacgatggtgatggtggcgttgattgtggtgttttatctactgcgctactttttcgccagcgccacggcgtatacctccgctctcgcaccgatgatgattgctgctgcgctggcgatgccggaaatcccgctgccggtgttctgcctgatggttggtgcggcaattggtctggggagcattcttacaccatacgccaccggccccagtccgatttactacggcagtggttatctgccaacggcggattactggcgactgggggcgatttttgggctgatattcctcgtattgctggtgattaccggcttactgtggatgcccgtggtgttgctttaagtgaggacggtgccggaaattgctctccggcacccaatagttttacgcagccggtaactccgccagcggccagcgcggacgcacgctaacgccgagatccgccgtcgcgcctgctttaaaccgcaccattccggcataggcgatcatcgcgccgttatcagtacaaaattccggacgcgcgtagaacacttcgccgcggcgttttttcatcatttcagccagcttcgcccgtaacgtacggttagcactcacgccgcccgccatgaccagtcgcttaaagcccgtctgatccagcgcccgcttgcacttaatcatcagcgtatcgaccaccgcatcttcaaaggcgcgggcgatatcagcacgcgtctggtcgtcggtgccgttgtcacgaatggtatttgccgcgaaggttttcaggccggagaagctgaaatccagccccggacggtcggtcatcggacgcgggaagacaaagcgcccggcagtaccctgagccgccattttgctcagtaacggcccgccaggataatccagccccagcagcttcgcggttttatcaaacgcttccccggcggcatcatcgatagactcgccgagcagctcgtactgaccaatgccagtcacgctgattaactgcgtatgaccgccggaaacaagcagcgcaacaaacggaaattccggcgggttatcttccagcatcggcgctaacagatgcccttccatatggtgtacagggatcgccggaacgtcccaggcaaacgccagagaacgccccacggtcgcgccaaccagtagcgcgccgactaatccagggcctgcggtataggccacagcatcaatgtcttttgccgttaaaccagactcctttagcgccgcctggatcaacggtacggttttacgcacatgatcgcgggaggccagttcaggcacgacgccgccgtagtcagcgtgcaatttcacctgactatacaattggttggctaacaaacctttttcatcgtcgtaaatggcgatgccggtttcatcgcaggaagtttcaatacccagtacacgcatgacttgttttacctcgctttattaccgcgcagtgtaggaccaatgcgggttgatgtaaaactttgttcgcccctggagaaagcctcgtgtatactcctcacccttataaaagtccctttcaaaaaaggccgcggtgctttacaaagcagcagcaattgcagtaaaattccgcaccattttgaaataagctggcgttgatgccagcggcaaaccgaattaatcaaaggtgagaggcacatgccggtaattaaagtacgtgaaaacgagccgttcgacgtagctctgcgtcgcttcaagcgttcctgcgaaaaagcaggtgttctggcggaagttcgtcgtcgtgagttctatgaaaaaccgactaccgaacgtaagcgcgctaaagcttctgcagtgaaacgtcacgcgaagaaactggctcgcgaaaacgcacgccgcactcgtctgtactaattccccgagagcgttgctctccgatcagaccgagttgtagttgtaaggccgtgcttccgaaaggaatgcgcggcttattttcgtttatgaattgctaaaaatcggggcctatggctggacgaatcccacgcgtattcattaatgatctgctggcacgcactgacatcgtcgatctgatcgatgcccgtgtgaagctgaaaaagcagggcaagaatttccacgcgtgttgtccattccacaacgagaaaaccccgtccttcaccgttaacggtgagaaacagttttaccactgctttggatgtggcgcgcacggcaacgcgatcgacttcctgatgaactacgacaagctcgagttcgtcgaaacggtcgaagagctggcagcaatgcacaatcttgaagtgccatttgaagcaggcagcggccccagccagatcgagcgccatcagaggcaaacgctttatcagttgatggacggtctgaatacgttttaccaacaatctttacaacaacctgttgccacgtctgcgcgccagtatctggaaaaacgcggattaagccacgaggttatcgctcgctttgcgattggttttgcgccccccggctgggacaacgtcctgaagcggtttggcggcaatccagaaaatcgccagagtttgattgatgcggggatgttggtcactaacgatcagggacgcagttacgatcgtttccgcgagcgggtgatgttccccattcgcgataaacgcggtcgggtgattggttttggcgggcgcgtgctgggcaacgatacccccaaatacctgaacagcccggaaacagacattttccataaaggccgccagctttacggtctttatgaagcgcagcaggataacgctgaacccaatcgtctgcttgtggtcgaaggctatatggacgtggtggcgctggcgcaatacggcattaattacgccgttgcgagcttaggtacgagtaccaccgccgatcacatacaactgttgttccgcgcgaccaacaatgtcatttgctgttatgacggcgaccgtgcaggccgcgatgccgcctggcgagcgctggaaacggcgctgccttacatgacagacggccgtcagctacgctttatgtttttgcctgatggcgaagaccctgacacgctagtacgaaaagaaggtaaagaagcgtttgaagcgcggatggagcaggcgatgccactctccgcatttctgtttaacagtctgatgccgcaagttgatctgagtacccctgacgggcgcgcacgtttgagtacgctggcactaccattgataagccaagtgccgggcgaaacgctgcgaatatatcttcgtcaggaattaggcaacaaattaggcatacttgatgacagccagcttgaacgattaatgccaaaagcggcagagagcggcgtttctcgccctgttccgcagctaaaacgcacgaccatgcgtatacttatagggttgctggtgcaaaatccagaattagcgacgttggtcccgccgcttgagaatctggatgaaaataagctccctggacttggcttattcagagaactggtcaacacttgtctctcccagccaggtctgaccaccgggcaacttttagagcactatcgtggtacaaataatgctgccacccttgaaaaactgagcatgtgggacgatatagcagataagaatattgctgagcaaaccttcaccgacagtctcaaccatatgtttgatagcctgcttgaactgcgccaggaagagttaatcgctcgtgagcgcacgcatggtttaagcaacgaagaacgcctggagctctggacattaaaccaggagctggcgaaaaagtgatttaacggcttaagtgccgaagagcgatcgggaagcccccgacagccgcactgagaggcagcggcaaatatataagtacgccctcgtaattatcgttggcggtaaacaaccgttggatttcagcgttaacggctgaaggacatcgggtcaatcgcccaacaccaacctcatgaaataagtgtggataccgtcttatggagcaaaacccgcagagtcagctgaaacttcttgtcacccgtggtaaggagcaaggctatctgacctatgccgaggtcaatgaccatctgccggaagatatcgtcgatagtgatcagatcgaagacatcatccaaatgatcaacgacatgggcattcaggtgatggaagaagcaccggatgccgatgatctgatgctggctgaaaacaccgcggacgaagatgctgccgaagccgccgcgcaggtgctttccagcgtggaatctgaaatcgggcgcacgactgacccggtacgcatgtacatgcgtgaaatgggcaccgttgaactgttgacccgcgaaggcgaaattgacatcgctaagcgtattgaagacgggatcaaccaggttcaatgctccgttgctgaatatccggaagcgatcacctatctgctggaacagtacgatcgtgttgaagcagaagaagcgcgtctgtccgatctgatcaccggctttgttgacccgaacgcagaagaagatctggcacctaccgccactcacgtcggttctgagctttcccaggaagatctggacgatgacgaagatgaagacgaagaagatggcgatgacgacagcgccgatgatgacaacagcatcgacccggaactggctcgcgaaaaatttgcggaactacgcgctcagtacgttgtaacgcgtgacaccatcaaagcgaaaggtcgcagtcacgctaccgctcaggaagagatcctgaaactgtctgaagtattcaaacagttccgcctggtgccgaagcagtttgactacctggtcaacagcatgcgcgtcatgatggaccgcgttcgtacgcaagaacgtctgatcatgaagctctgcgttgagcagtgcaaaatgccgaagaaaaacttcattaccctgtttaccggcaacgaaaccagcgatacctggttcaacgcggcaattgcgatgaacaagccgtggagcgaaaaactgcacgatgtctctgaagaagtgcatcgcgccctgcaaaaactgcagcagattgaagaagaaaccggcctgaccatcgagcaggttaaagatatcaaccgtcgtatgtccatcggtgaagcgaaagcccgccgtgcgaagaaagagatggttgaagcgaacttacgtctggttatttctatcgctaagaaatacaccaaccgtggcttgcagttccttgacctgattcaggaaggcaacatcggtctgatgaaagcggttgataaattcgaataccgccgtggttacaagttctccacctacgcaacctggtggatccgtcaggcgatcacccgctctatcgcggatcaggcgcgcaccatccgtattccggtgcatatgattgagaccatcaacaagctcaaccgtatttctcgccagatgctgcaagagatgggccgtgaaccgacgccggaagaactggctgaacgtatgctgatgccggaagacaagatccgcaaagtgctgaagatcgccaaagagccaatctccatggaaacgccgatcggtgatgatgaagatagccatctgggggatttcatcgaggataccaccctcgagctgccgctggattctgcgaccaccgaaagcctgcgtgcggcaacgcacgacgtgctggctggcctgaccgcgcgtgaagcaaaagttctgcgtatgcgtttcggtatcgatatgaacaccgactacacgctggaagaagtgggtaaacagttcgacgttacccgcgaacgtatccgtcagatcgaagcgaaggcgctgcgcaaactgcgtcacccgagccgttctgaagtgctgcgtagcttcctggacgattaatcggtaggccggatcaggcgttacgccgcacccggcactaggccctctgcacaaacgccaccttttcggtggcgttttttatcgcccacgcactaccagcgcctggtccagctcgcgatacgcttcaaccagtttctccagactaacgcgacttaaaccgctgggatttggcagcacccaaatctgcgtgctaccaatggtgagcgtttgtttcccccactgtgcaccgcgctggctgaatccctgttcatatgcttgtttgcccagaatcgccaacgcctgcggctgataatcttcaattttttcaatcagcttacgcccgcctgcgtgtagctcctgcttactaacttcattggcttgcaccgttggacggtctaccagtttggtgacgccacaacgataatccagcagatgctgtgcctcctgcggcttcaactgacggtcggtaaacccggcctgatatatcaccttccagaagcgatttgccggatgagcaaagggaaaaccagtcccggcggaactaagcccagggttgataccgcaaaacacgacccgtaaccctggagccaaaatatcctcaaccatatttactcctttctaacatcaccaggaaaagtataacggattgaaaatacattgtttataaaaacagcaggcgcgcggtaatggctggattgcgacacggagttactttataatccgctaccatggccccttagctcagtggttagagcaggcgactcataatcgcttggtcgctggttcaagtccagcaggggccaccagatatagcaaaggctgacgagaaatcgtcagcctttttctttttatatatcagttactttgcgtgccagtaagccgctgcacgtacccgctgtgggtcatactgttccgcttcaaagcggcggcttaaattcttaacgactttaccttcgccggttatccagatgaagtaatcatcggcagggatttgcatctgcgccagacgcgcatctaccgcctgctcatcatgtgccagccattcgatattaaaaccatcaaggtgcgcgagataatcctgacaggcgttatcccgcacgctaaccagcgcactaacttgcggtttaacggcaagtttgctcaacgtttccaggcggcggcgcaatgcaggcattccggattcatcgcagacatacagctgatacgcgtaatcttccggcaccaccaggctaccgcgcggacctgccaccgtaagtttatcgcccggttgcgcctgcatcgcccagccgctggcgaccccaccgtcgtgaataaagaaatcaatcgccagttcatggcgtagttcgtcatacagcggcgtatagtcacggctcggtgggcgtggtccttccggccagacgatgccctcttccgttaccgttggcggcacaaagtgagcgtcaggttgaggaaagaagagtttgctgtgatcgtcaaagccacggcttgtaaaaccgtccagcgcctcgccgccgaggacaatgcgctgaaaaccggcgctgatgcgctcaacgcgtaacacagtcagttcacggaagcgcagatcattgcgaacgcgctgcgggtagcggggggtgttattcattgttatcgccttcgtgatggtaatcagatatatctaaataaaactcgcaaatgataatgattgttaatcatgataaatgcaagcgatttgtagaactgatatgtctatagtctgataagacgaaccgcctcttctcaggcatcattactcaacgccggatgcggcgtgaacgccttatccggcctacgtgtgagatgagtccacgtttaaaaatcatttttacacttgcaagaacgctcatatcagatataaattagatatatctaattaagcaaaaggaggctgatatgagccatcatcacgaagggtgttgtaaacatgaaggccagccacgccatgagggctgctgcaaaggtgagaagagtgaacacgagcactgcggacacggtcaccagcatgaacacggtcaatgctgcggtggtcgccacggtcgcggcggcggtcgtcggcaacgtttctttggtcacggtgaattacgtctggtgattctggatattctcagccgcgatgacagccacggttacgaattgattaaagcgattgagaatctaacccaggggaattacaccccaagcccgggcgtcatctacccaacgctggattttctgcaggagcagagcctgattaccatccgcgaagaggaaggaggtaagaagcagattgcgctgaccgaacaaggcgcgcagtggctggaagaaaaccgcgaacaggtggagatgattgaagaacgcatcaaagcgcgttgcgttggcgcggcgctgcgccagaacccgcaaatgaagcgggcgctggataattttaaagcggtgctggatttacgcgtcaaccagagcgatatcagtgatgcacaaataaaaaagatcattgcggtgatcgaccgcgccgcttttgatattacgcaactggattaatcgccgcatccgccagtggcgcggtgcaattgccggatgcgacgcttgacgcgccttatccggcctacacccgctacacaccccgcaggcctgataagatgcgccagcatcgcatcaggcattgtgctccaaccgccggatccggcataccgattaatgcagtaccgtcaccgcgtcttccagtcggctggcgcggtgtttcaccatcgcgctcacctgcgcactctcttccaccagctcggcatttttctgggtgatcaggttaagctcatccactgcacgggtcaggctggaaagcccatcggcctgttccagcgtactatggctaatctgggcgatcaactgggtgacgtttttcacctgtgccacaatatcttccatcgtccgtccggcggcgtgtacctgctggctaccggattgcaccttatcagcactggcatcaatcagcttgcgaatatcgttggcagcattagcgctgcggctggctaaatgacgcacttcccctgccaccactgcaaaacctttgccctgttcgccggcacgcgccgcttccaccgccgcattcagggccagaatattggtctgaaacgcaatatcgttaatcaggctagtaatggtgccaatgcgctgggtactgtcggcgatatcgtccattgtcttgatcaccgtggtcatcgcctccccaccctgcactgccgcattactggcagtgatactcagtttatcggcagcgctcgccgtggcagagttctgtttcacgctcgccgccatttggttcatggtcgccaccgtttgctgaacgttatcaactgtctgctgggtatgttcgttcagttcatcggtgcctttcgccagcgtctcactgccatttctgacactggacacctggctactgacatcgttaattagccaacggcacatcaggccaagttgccctaccgcacgtaatgtcagccccagctcatcgctgcgattcagatgctcaacactattacgttctccggtcgccaccttcagtgcctgatgggcaacattttctatcgggcgcacaatctgccattcaaaacaggcgcttgccaacaataccactaacgcacagaggatatacgtcaccaccggggcagcaacaaaccaaagcatggccgccagcaagataaacatcagggtcatcactccacgcgcccgccagcgaagcggtaaactaggcagtttacccagccagcctttacgcaccaccaggcctttatgaatacgcttactggtacgtccggcgttcaacgctttgtacagcggctccaccgccgcgatctcttcatccgtcgcccgggtacgaatgctcatatagccactgatttttccctcgcgcaccatcggtaccgcattggcccgcacccaataatggtcaccatttttgcggcgatttttcacgatgccgctccagggctccccttttttcagggtgaaccacatatccgcaaacgccgcttttggcatatccgggtgacgcaccatgttgtgcggctgcccttgtaactcttgcaaggtatagccgctcacctgcacaaaagtgtcattagcatgagtgatatagctttgcagatcggtagtggacatcagagtggtatcgtccgccagcggggtattttgctgggtgacatacggatgagaagacatgttcgcgtcctgtgcaggttatatggttgttaacttcttgtcagagtttatgtcggccccgctgcggttatctttaaccgattaatttgatttagatcgcaatttgcgatttaaacacaaatctaattccttgatttaaaatactttcactctgttactatacgaaaacgttaattatcttgcccaaaaatcaggcaattattgccctgaaaacgtgcatttgcgcagcaatcatcaaatccatacccgacaaaaaccgtgcaaaataacaacaaatgttaacagatagcattaaatattgcacaaatgataaccgaatttgtgtttatcccgattttcgcgatcgcagccggagtggcgcaatccctgcaatacttaaatcggtatcatgtgatacgcgagcctccggagcatattttgaacaggttacctagcagcgcaagcgctttagcgtgcagcgcccacgccctgaatctcattgagaagcgaacgctggatcatgaggagatgaaagcacttaaccgagaggtgattgaatacttcaaagagcatgtcaatccggggtttttagagtatcgcaaatctgttaccgccggcggggattacggagccgtagagtggcaagcgggaagtttaaatacgcttgtcgacacccagggccaggagtttatcgactgcctgggaggttttggaattttcaacgtggggcaccgtaatccagttgtggtttccgccgtacagaatcaacttgcgaaacaaccgctgcacagccaggagctgctcgatccgttacgggcgatgttggcgaaaacccttgctgcgctaacgcccggtaaactgaaatacagcttcttctgtaatagcggcaccgagtccgttgaagcagcgctgaagctggcgaaagcttaccagagtccgcgcggcaagtttacttttattgccaccagcggcgcgttccacggtaaaagtcttggcgcgctgagcgccacggcgaaaagcaccttccgcaaaccgtttatgccgttactgccgggcttccgtcatgtgccgtttggcaatatcgaagccatgcgcacggctcttaacgagtgcaaaaaaaccggtgatgatgtggctgcggtgatcctcgaaccgattcagggtgaaggtggcgtaattctgccgccgccgggctatctcaccgccgtacgtaagctatgcgatgagttcggcgcactgatgatcctcgatgaagtacaaacgggcatggggcgcacgggcaagatgttcgcctgcgagcatgagaacgtacagccggatatcctctgccttgccaaagcgctcggcggcggcgtgatgccgattggcgcgaccatcgccactgaagaggtgtttagtgttctgttcgacaacccattcctgcataccaccacctttggcggcaacccgctggcctgtgcggcggcgctggcgaccatcaatgtgttgctggagcagaacttaccggctcaggctgagcaaaaaggcgatatgttgctggacggtttccgtcaactggcgcgggaatatcccgatctggtacaggaagcgcgtggtaaagggatgttgatggcgattgagtttgttgataacgaaatcggctataactttgccagcgagatgttccgccagcgcgtactggtggccggaacgctcaataacgccaaaacgatccgcattgaaccgccactgacactgaccattgaacagtgtgaactggtgatcaaagcggcgcgtaaggcgctggcggccatgcgagtaagtgtcgaagaagcgtaatatcaaatcggatggcgatacgacgtcgccatccgatctttttatacgacgcgtacgcccgcaggcatcatccgctccggcgttaacagcacgctttcactgccgtcatcggtttccgcacacaacagcatgcattcgctcgtttcaccacgcattttcgctttttgcagattgcataagaccaccaccgttttccccatcagctcttcttcgctgtagtacggcaccaggctggtcacggtttgcagcgttttttgccccacatcaacctgtacgatgtacagcttgtcggcgttttcatggcgtttcacttccacaatctttccgacgcgcatttccagacgtgcaaaatcagcgtaagccacggtttccattgcttcctcccttagggtaaaattttactaaactatagcaaaagtttttctcaatcctgtaggctaaaaatggagaatgcaggcgtgatcacattcgtgagccgctgtgttaccgttacagcgtcaaagaaacgcgctttatttactgaaaacaggtgacccgataagcacttcctctacaatgggggcgcacatcagggaaagtaaaaaaggtaaacatggcaacactaaaagacatcgcaatcgaagctggcgtatccctggcgacagtatccagggtcttaaatgacgatccgacattgaatgtgaaagaagagacgaaacatcgcattctcgagatcgccgaaaagctggagtacaagaccagtagtgcccgtaaactccagacaggtgcagtcaaccaacaccatattctggctatctacagctaccagcaggagctggagatcaacgatccttactatctggcgatccgccacggcattgaaacccagtgcgaaaagctgggcatcgagctcaccaactgttatgaacacagcggcttaccagacattaaaaacgtcaccggtattttaattgtcggcaaacccacgcccgccctgcgcgccgctgccagcgcgttgaccgacaatatctgttttatcgactttcacgaacccggcagcggttacgatgcggtggatatcgatctggcacgcatcagtaaagaaatcatcgacttctatatcaaccagggcgttaatcgtattggttttattggcggtgaagatgagcctggcaaggcggatattcgtgaggtcgcctttgcggaatatggccgactgaaacaagtggtacgcgaagaggatatctggcgcggcggtttttccagtagcagcggttatgaactggcaaaacaaatgctggcgcgggaagactatccgaaggcactgtttgttgcttccgattccattgctatcggcgtactgcgggcaattcatgaacgaggcctgaacatcccacaggatattagccttatcagcgttaacgatatccccaccgcgcgatttacctttccgccgctctccaccgtgcgcatccattccgagatgatgggaagtcagggcgttaacctggtgtatgaaaaagcccgcgatggtcgcgcgctgccgctgttagtcttcgttcccagcaaattaaaactgcgcggcacgacccgttaaatccccttacacactgtccggcaatcgtttttgccggacagtgctgccgtttattttcgtgatccagttaaagtaaatgcatttacctgctactttttagtaaaaattttactaaactccccagcaattacacaaactaccatcaccatgaatggttccgatttctctctaccgggaggccctatgaatcgctgggaaaacattcagctcacccacgaaaaccgacttgcgccgcgtgcgtacttttttagttatgattctgttgcgcaagcgcgtacctttgcccgcgaaaccagcagcctgtttctgcccttaagcggtcagtggaatttccacttttttgaccatccgctgcaagtaccagaagccttcacctctgagttaatggctgactgggggcatattaccgtccccgccatgtggcaaatggaaggtcacggcaaactgcaatataccgacgaaggttttccgttccccatcgatgtgccgtttgtccccagcgataacccaaccggtgcctatcaacgtattttcaccctcagcgacggctggcagggtaaacagacgctgattaaatttgacggcgtcgaaacctattttgaagtctatgttaacggtcagtatgtgggtttcagcaagggcagtcgcctgaccgcagagtttgacatcagcgcgatggttaaaaccggcgacaacctgttgtgtgtgcgcgtgatgcagtgggcggactctacctacgtggaagaccaggatatgtggtggagtgcggggatcttccgcgatgtttatctggtcggaaaacacctaacgcatattaacgatttcactgtgcgtaccgactttgacgaagcctattgcgatgccacgctttcctgcgaagtggtgctggaaaatctcgccgcctcccctgtcgtcacgacgctggaatataccctgtttgatggcgaacgcgtggtgcacagcagcgccattgatcatttggcaattgaaaaactgaccagcgccagctttgcttttactgtcgaacagccgcagcaatggagtgcagaatccccttatctttaccatctggtcatgacgctgaaagacgccaacggcaacgttctggaagtggtgccacaacgcgttggcttccgtgatatcaaagtgcgcgacggtctgttctggatcaataaccgttatgtgatgctgcacggcgtcaaccgtcacgacaacgatcatcgcaaaggccgcgccgttggaatggatcgcgtcgagaaagatctccagttgatgaagcagcacaatatcaactccgtgcgtaccgctcactacccgaacgatccgcgtttttacgaactgtgtgatatctacggcctgtttgtgatggcggaaaccgacgtcgaaagccacggctttgctaatgtcggcgatattagccgtattaccgacgatccgcagtgggaaaaagtctacgtcgagcgcattgttcgccatatccacgcgcagaaaaaccatccgagcatcatcatctggagcctgggcaatgaatccggctatggctgtaacatccgcgcgatgtaccatgcggcgaaagcgctggatgacacgcgactggtgcattacgaagaagatcgcgatgctgaagtggtcgatattatttccaccatgtacacccgcgtgccgctgatgaatgagtttggtgaatacccgcatccgaagccgcgcatcatctgtgaatatgctcatgcgatggggaacggaccgggcgggctgacggagtaccagaacgtcttctataagcacgattgcattcagggtcattatgtctgggagtggtgcgaccacgggatccaggcacaggacgaccacggcaatgtctggtataaattcggcggcgactacggcgactatcccaacaactataacttctgtcttgatggtttgatctattccgatcagacgccgggaccgggcctgaaagagtacaaacaggttatcgcgccggtaaaaatccacgcgcgggatctgactcgcggcgagttgaaagtcgaaaataaactgtggtttaccacgcttgatgactacaccctgcacgcagaggtgcgcgccgaaggtgaaacgctcgcgacgcagcagattaaactgcgcgacgttgcgccgaacagcgaagcccccttgcagatcacgctgccgcagctggacgcccgcgaagcgttcctcaacattacggtgaccaaagattcccgcacccgctacagcgaagccggacaccctatcgccacttatcagttcccgctgaaggaaaacaccgcgcagccagtgcctttcgcaccaaataatgcgcgtccgctgacgctggaagacgatcgtttgagctgcaccgttcgcggctacaacttcgcgatcaccttcagtaaaatgagtggcaaaccgacatcctggcaggtgaatggcgaaagcctgctgactcgcgagccaaagatcaacttcttcaagccgatgatcgacaaccacaagcaggagtacgaagggctgtggcaaccgaatcatttgcagatcatgcaggaacatctgcgcgactttgccgtagaacagagcgatggtgaagtgctgatcatcagccgcacagttattgccccgccggtgtttgacttcgggatgcgctgcacctacatctggcgcatcgctgccgatggccaggttaacgtggcgctttccggcgagcgttacggcgactatccgcacatcattccgtgcatcggtttcaccatgggaattaacggcgaatacgatcaggtggcgtattacggtcgtggaccgggcgaaaactacgccgacagccagcaggctaacatcatcgatatctggcgcagcaccgtcgatgccatgttcgagaactatcccttcccgcagaacaacggtaaccgtcagcatgtccgctggacggcactgactaaccgccacggtaacggtctgctggtggttccgcagcgcccaattaacttcagcgcctggcactatacccaggaaaacatccacgctgcccagcactgtaacgagctgcagcgcagtgatgacatcaccctgaacctcgatcaccagctgcttggcctcggctccaactcctggggcagcgaggtgctggactcctggcgcgtctggttccgtgacttcagctacggctttacgttgctgccggtttctggcggagaagctaccgcgcaaagcctggcgagctatgagttcggcgcagggttcttttccacgaatttgcacagcgagaataagcaatgaggatcatcgataacttagaacagttccgccagatttacgcctctggcaagaagtggcaacgctgcgttgaagcgattgaaaatatcgacaacattcagcctggcgtcgcccactccatcggtgacagtttgacttaccgcgtggagacagactccgcgaccgatgcgctatttaccgggcatcgacgctattttgaagtgcattactacctgcaagggcagcaaaaaattgaatatgcgccgaaagagacattacaggtagtggaatattatcgtgatgaaactgaccgtgaatatttaaaaggctgcggagaaaccgttgaggtccacgaagggcaaatcgttatttgcgatatccatgaagcgtatcggtttatctgcaataacgcggtcaaaaaagtggttctcaaagtcaccatcgaagatggttatttccataacaaataacaactacggcggcaaaaggagtttgccgccaccgctaccctactcattttcggagatgtgttatgtctgataccaaacgtaatacaatcggcaaattcggcttgctcagcctgacttttgccgccgtttacagctttaacaacgttatcaataataatattgagcttggactggccagcgcaccgatgtttttcctcgcgacgattttttattttattcccttctgtctgatcatcgcagaatttgttagcttaaataaaaacagtgaagccggtgtctacgcgtgggtaaaaagtagcctgggcggacgttgggcatttattactgcctatacctactggttcgtaaacctgttctttttcaccagtctgttgccgcgcgttattgcttatgctagctatgccttcctcggatacgaatatattatgacgccggttgccaccaccattatcagtatggtgctgttcgccttctccacctgggtttccaccaacggggcgaaaatgttggggccaattacctccgtcactagtacgctgatgctgctgttaacgctctcctacattttactggcaggtacggcgctggttggcggcgtacagcctgctgacgccatcaccgttgacgcgatgatcccgaacttcaactgggcgttcctcggcgttaccacctggatctttatggccgcaggtggcgcggagtccgtcgctgtgtacgttaacgacgtcaaaggcggtagcaaaagcttcgttaaagtgatcatcctcgccgggatttttatcggcgtactgtattccgtctccagcgtgctgattaacgtcttcgtcagcagcaaagagttgaaatttaccggcggaagcgtgcaggtattccacggcatggcggcgtattttggtctaccggaagcgttgatgaatcgctttgtcggtctggtgtcctttaccgcgatgttcggttccctgctgatgtggaccgcaacgccggtgaaaattttcttctccgaaatcccggaaggcatctttggtaagaaaaccgtcgaactgaacgaaaacggcgttccggcgcgcgcagcgtggatccagttcctgatcgtcatcccgctgatgattatcccgatgctcggttccaataccgtgcaggatctgatgaatactattattaatatgaccgccgcagcgtccatgcttccgccgttattcatcatgctggcttacctgaatttacgcgccaaattagatcacctgccacgcgatttccgtatgggctcccgccgcaccggtattatcgttgttagtatgctgattgcgatatttgccgtagggtttgtcgctagcacattcccgactggcgcgaatattctgaccatcattttttataacgtcggcggtattgttatcttccttggctttgcgtggtggaaatacagtaaatatataaagggattaacggctgaagagcgccatattgaagcgacgccagccagcaatgttgattaagcagaataataaaaaatgagcaggcattttccctcttcctggatgaggagagggaaaatagtttctgcctttatatttttataattacaacgataaaaggctgtactttttctttagctcatggattaacacaatgaaattaatcactgcaccatgcagagcattacttgctctgccgttttgctacgccttttctgcggcaggagaagaagcacgtccggcagaacatgacgacacaaaaacacccgcaattaccagcacatcttctcctagttttcgtttttacggcgaattaggggttggtggatatatggatttagagggtgagaataaacataaatacagcgacggtacctatattgaaggtggcctggagatgaagtacggctcctggttcggcctgatttacggcgaaggctggaccgtgcaggccgaccacgacggcaatgcctgggtgccagaccatagctggggtggtttcgagggcggaattaaccgtttctatggcggttatcgtaccaatgatggcaccgaaatcatgctcagtctgcgtcaggattccagcctggatgacctgcaatggtggggcgatttcacccccgatctgggctacgtcattcccaatacccgcgacattatgactgcgctgaaggtacagaacttaagcggcaactttcgttatagcgtcaccgcgactcctgccggacatcatgatgaaagcaaagcctggctacattttggcaaatacgatcgctatgacgacaaatacacctatccggcaatgatgaacggttacatccagtatgaccttgccgaaggcatcacctggatgaacggtctggaaatcaccgacggcacaggacagctctatctcacgggcctgctaactcctaactttgccgctcgcgcctggcaccataccggacgcgccgacgggctggacgtaccgggaagtgaaagtgggatgatggtgagcgccatgtatgaagcgttaaagggcgtttatctctccaccgcttacacctacgccaaacatcgccctgaccacgctgacgatgaaaccacctctttcatgcagtttggtatctggtacgaatacggcggcggacgtttcgccacggcttttgatagccgcttctacatgaaaaatgcctctcacgatcccagcgaccaaatcttcctgatgcaatatttctactggtaataaggactgtaatttcatgaaaataaaaactattttaacgccagtaacctgcgctctgctgataagtttttccgcccatgccgctaacgccgacaattataaaaacgtgattaaccgtactggcgcgccgcagtacatgaaggattacgattacgacgatcaccagcgttttaatccgtttttcgatctcggagcctggcatggtcatctgttgccagacggccctaacaccatgggcggctttccgggcgttgcgctgctgacggaagagtacatcaactttatggccagcaatttcgaccgcctgaccgtctggcaggacggcaagaaagtcgactttacgctggaggcatacagtattcccggtgcgctggtgcaaaaactgacagcaaaagatgtgcaagtcgaaatgactctgcgcttcgccacgccgcgcacgagtctactggaaaccaaaatcaccagcaataaaccgctggatctggtgtgggacggcgaactgctggaaaaactggaagcgaaagaagggaaaccgctttccgataaaaccattgctggcgaataccctgactatcagcgcaaaatcagcgccacccgtgatggcctgaaagtcacctttggcaaagtgcgcgccacctgggatctgctgacctccggcgaaagcgaatatcaggtgcataaatccctgccggtgcagactgaaatcaacggtaatcgctttaccagtaaggcgcatatcaacggtagcaccacgctctacaccacctattcccatctgctgaccgctcaggaagttagcaaagagcaaatgcagatccgcgatattctggcgcgtccggcgttttatctcaccgccagccagcaacgctgggaagaatacctgaagaaagggttaaccaatccggatgcgacgccggaacagacgcgcgtcgcggtgaaagcgatcgaaacgctcaacggtaactggcgcagtccgggcggtgcggtgaaatttaacaccgttacaccgagcgtgaccgggcgctggttctccggcaatcagacctggccgtgggatacctggaagcaggcgtttgcgatggcgcatttcaatccggacatcgccaaagagaatatccgcgcggtcttctcctggcagatccagcctggcgatagcgtgcgtccgcaggatgtgggctttgtccccgacctgatagcgtggaaccttagccccgagcgtggtggcgatggcggcaactggaacgaacgtaataccaaacccagccttgccgcctggagcgtgatggaagtgtataacgtcacccaagataaaacctgggtggcagagatgtacccgaaactggtggcctatcacgactggtggttacgtaaccgcgatcacaacggcaacggcgtgccggaatatggcgcgacccgcgacaaagcccacaacactgagagcggcgagatgctgtttacggtgaaaaaaggcgataaagaagagacgcagtctgggctgaacaactacgcccgcgtggtggagaaaggccagtacgacagtctggaaattccggcacaggttgctgcaagctgggaaagcgggcgtgatgatgccgccgtctttgggtttatcgacaaagaacagttggataaatatgtcgctaatggcggcaaacgtagcgactggacggtgaaattcgccgaaaaccgcagtcaggacggaacgttgctgggctacagcctattgcaggagagcgtggatcaggccagctatatgtacagcgataaccattatctggcggagatggcaaccatcctcggtaagccagaagaggccaaacgctatcgccagttggcacagcagctcgcggactacatcaacacctgtatgttcgacccgactacccagttctactatgacgtacgtattgaagataaaccactggcgaacggctgcgcgggcaaaccgattgttgagcgcggtaaagggccggaaggctggagcccgctgtttaacggtgcggcaacgcaggccaatgccgacgcggtggtgaaggtgatgctcgatcctaaagagttcaacacctttgtcccgctgggaacggcggcgttaaccaatccggcttttggcgctgatatctactggcgtgggcgcgtatgggtggatcagttctggtttggtctgaaagggatggagcgttacggttatcgtgatgatgccctgaagctggcggatacgttcttccggcacgccaaagggttaaccgccgatggaccaattcaggaaaattacaacccgctgacaggcgcacagcaaggcgcaccaaatttctcctggagtgccgcgcatttgtatatgttgtataacgattttttccgtaagcaataatttgcaactgctggcggatgcggcgtaaacgccttatccgccctacatgtgcaatcctcctggccggataaaacgcggcaagcgttgcatccggcaactgcaccgcgccactggcggatgcggcgtgaacgccttatccgccctacatgtgtgttcccgtaggtcggataagacgcgacaagcgtcgcatccggcatctgcaccgcgccactggcggatgcggcgtggacgccttatccgccctacatgtgcaattccgtaacctggataaaacgcgacaagcgtcgcatccggcgttatcaccgggcgtattctttttgaatcccatcacaaaccccgcactccccttttcccttttctccggcgacggctaaattagaactcatccgaccacataacaattattttacatactggacaattttatgagctacccgagcctgttcgccccgctggatttaggttttaccacgttaaaaaaccgcgtgttgatgggcagtatgcacaccgggctggaggaatacccggacggtgccgagcggctggcagcgttttatgccgaacgcgcccgtcacggcgtggcgctgattgtcagcggcggcattgcaccagatttaacaggcgttggcatggaaggtggcgcaatgctcaacgacgccagccagatcccacaccatcgcaccattaccgaagcggtacatcaggaaggcggcaaaatagccctgcaaattttgcataccgggcgctacagctaccaaccgcatctggtcgccccgtccgcattgcaggcccccatcaaccgtttcgtgccccatgagttaagccatgaagagatcctgcaactgatcgacaatttcgcccgctgcgcgcaactggcgcgggaggcaggatacgacggtgtagaggtgatgggttccgaagggtatttgatcaacgaatttctgacgctgcgcaccaatcagcgtagtgaccagtggggcggcgattaccgcaaccggatgcgatttgccgtagaagtagtgcgtgcggtgcgcgaacgcgtcggcaacgacttcattattatctaccgactgagcatgctcgacctggtcgaagacggcgggacttttgccgaaacggtagagctggcgcaggccattgaagcggcgggcgcgaccattatcaacaccggcattggctggcatgaagcacgtattccgaccattgccacgcccgtgccgcgcggcgcatttagctgggtcacgcgcaaactgaaaggccacgtcagcctgccgctggtaaccaccaaccggattaacgatccgcaggttgccgacgatattctcagccgcggcgatgccgatatggtaagcatggcgcgaccgtttcttgctgatgcggagctgctgagtaaagcgcaaagcggacgagccgatgagatcaacacttgtattggctgcaatcaggcctgtctcgatcaaatcttcgttggcaaagtcaccagctgcctggtgaatcctcgcgcctgccacgaaaccaaaatgccaatccttcccgccgtgcagaaaaaaaatctggcggtggtcggtgcgggacctgctgggctggcgtttgccattaacgcggcggcgcgtgggcatcaggtaacattgtttgacgctcatagcgagattggcgggcagtttaatatcgccaaacagatccccggcaaagaggagttttacgaaacgctgcgctattaccgccggatgatcgaagtgacgggcgtgacgctaaaactcaatcacaccgtgacggcggatcagttacaggctttcgatgaaacgatcctcgccagtgggatcgtgccgcgcactccgcccatcgacgggatcgatcatccgaaggtattgagttatctcgatgtactgcgcgacaaagcgccggttggcaacaaagttgccatcatcggttgtggcgggattggttttgatacggcgatgtatttaagtcagccgggcgaatccaccagccagaatatcgccgggttctgtaatgaatgggggatcgacagtagcctacaacaggctggtggcttaagcccgcagggaatgcagatcccccgtagcccacggcagattgtgatgctccagcgcaaagccagcaaaccaggacaggggttaggcaaaaccaccggctggatccatcgcaccaccctgctcagccggggtgtgaaaatgatcccaggcgtaagttatcagaagattgacgatgacgggctgcatgtggtgatcaacggcgaaacgcaggtattagcagtggacaatgtggtgatctgcgcagggcaagagccaaaccgcgcgctggcgcaaccgctgattgatagcgggaaaacggtgcatttaattggcggctgcgatgtggctatggagctggacgcacgacgggcaattgcccagggaacacggctggcgctggagatttaaatcgttatttgaagcgccggatgcaacgcatccggcacgtcgcgttaatcaataaacaaggcgggagaaatgccgaatcgcgttgccaattttttagcgtgttccagcgttaatttcctcttcccgctcaaaacgcgactcaccatagatttactgccaatttccggcagatcggaaagggttaaaccatattgatccataagggtacgaatcacggctataccgccaggcatggcttgagccatggcattaaattccgcaaattcgggcgcactttcttcccacgcggttattttggcacacaccagatccagcaaggggttttcaggatcgttgagcagcagatgatctaccagttccagcgcctgggtgtattgttcctcgttctgaatacccgccagaaaaggtgccacagcagttagcttttctcctgcttgcaagatgtcggcaatcgcaatcattttttccccttagtacgatgaacagcggtaaagaaatcgtattctttatgcgtcataacttcacgtatgtagcacttttggctttcaaaaaagaccattgctacaacacgtaattcattgcccccaacattgaaaacataatgcttatccagatatttgaagttatccagagatgggaatactgcttttaaactctcaggttttttgaaatatcccttagcaatcgtgttccccagagccaccaactccgttttatgttgcgggtatttttccgcagcatctttcaatgctttttgagttatcaggtgcattcttcatcacgtccgttgacaaattggcaatatgataacatccgttgccagattggcaacggatgaatttatctgtgtgacggaagaataaacgtagaaaaacgctaaacaagagaatgtagacgatggtgacagggattttttgttttatggaagcgcgattccagaactgggcagacattgccggatgcgacgcttgccgcgtcttatccggcctggagtaacgtgctgaacgtaggccggataaggcgtttacgccgcatccggcaggtaactcccaatcttaccgacgacgtcccagcttcaccgctttcagtaccacaaatttattattcgtcgcaatagtggtgcagttgccgaaaatcttcttcagtttatggaagtaatccaggtgacggttggcaacgatatacagctcgccgttgattttcaggcagcggcgggcgtggtggaacatctcccaggcgacgttatcggtcagcgcatgttgttggtgaaacggcgggttgcagagcacagcattaaagcggaaaggctccacgccggagagcgcgttgttgatcataaactcgcagcgatccaacgcctctggcatgttggtttcaacgttcaaacggctggaagcaaccgccatcgggctttcatcgacaaacaccactttcgcctgcgggtttttatcaagcagcgtcagaccaataacgccattaccgcaaccgagatcgacaatctccccttcgagattctctggcagatgttgcataaagaagcgcgcgccgatatcaagcccggtgcgggagaagacattcgcatggttgtggatagtccagtcagtaccttccagcttccagctaacggtctgcggcgcatcggccagctgcggttcattgaaagtgcaattaatcaggcgcgcttttttccatgccagcgtggtggtggttgggccgagcactttttcgaacagttccagcgtggaagtgtgaatgtcacgggccttggcaccggcaataatacgtgtatcgctcgtgaccactttgcgcagcgcacgcagttgctgttccagcaatgccagtgttttcggcactttgatcagcaccacacccggctgttgcgggtagtcggcggtgctgtcgagaaacttcacgctgctctcatcaatcccgttgaggcgtaaattctcgcgcgtcgccagttcactgatgtaactgtcgccaatgctgtacggcttatgttccgccagtgcgcagcttaacgcaccaaaggcatcattcaggatcaacaccgggccgcggatttctgtgtcgtccaactgttgcagcaaatattcatccgccgcttcccacgcctgtagcgggttaacgtcatccgtcgccggaaaacgttgtagtgtcagactacggaaaccgttgtctaagtggctcatcggccctcctgaatgataaaatttcgacattgcccctgaaaagggtgcgtgagtataccctttttctctttttcgtgggcggttatgagcaatcttacttatcttcagggttatcccgagcagctactttcccaggtgcgaacactgattaacgaacagcgtctgggcgatgtgctggcaaaacgctatccgggaacacacgactacgccaccgataaagccctctggcaatatactcaggatctgaaaaatcagtttctgcgtaatgccccgccgatcaataaagtgatgtatgacaataagatccatgtgctaaaaaacgcgctcgggttacataccgctgtttctcgtgtgcagggcggcaagctgaaagcaaaggtggagatccgcgtcgctaccgtgtttcgcaacgcgccggaaccgtttttgcgcatgatcgtggtgcacgagctggcgcacctgaaggagaaagagcataacaaagcgttttaccagttgtgttgtcatatggaaccccagtaccaccagcttgagttcgacacccgactgtggctaacgcagttgagccttgggcagaacaaaatctgaaaatgatgtcaggcgttatcttttctttctttagcgcctaaaatcgacctcccccctttcgttaaggataacgaccatgctgcgcgcatttgcccgccttcttctccgtatttgtttttctcgccggactctaaagattgcctgcttactgttacttgtggcaggagcgaccatccttatcgccgatcgcgtaatggtcaacgccagcaaacagctgacctggagcgatgtcaacgccgttccggcgcgtaacgtgggtttattgctgggggcgaggccgggtaatcgctactttacccgacgtattgataccgcagcagcgttgtaccacgccggaaaagtgaaatggctgctggtaagtggcgataacggacgtaaaaattacgatgaagcaagtggtatgcagcaggctttgatcgctaaaggcgtaccagcaaaagtgatcttctgcgactatgccggattcagtacgctggatagcgtagtgcgtgccaaaaaggtttttggtgaaaaccatatcaccattatcagccaagaatttcataatcaacgcgccatctggctggcaaaacagtacggcatcgacgctatcggttttaacgcgccagacctcaatatgaagcacggtttttatactcaactgcgggagaaactcgctcgtgtcagcgccgtgattgacgccaaaatcctccatcgccagccgaaatatctcgggcctagcgtcatgattgggccgtttagtgagcatggctgtccggcgcagaaataatgcgtatctgcgcacgtcgaagatgaaaaaggcgtgctacattgacgacagaatccctttatggagtatccacgcgttatgatacgtttcgctgtgattggtacgaactggatcactcgccagttcgtcgaggccgcccatgagagcggtaaatacaagttaaccgccgtatattcccgcagccttgaacaggcccagcacttcgccaatgatttttctgtcgagcatctgtttaccagcctggaagcgatggcggaaagcgatgccattgacgcggtgtatattgccagcccgaattccctgcatttttcccagacacaacttttccttagccataaaattaatgtgatttgcgagaaaccgctggcgagcaatctggcggaagtggatgccgccattgcctgtgcgcgggaaaatcaggtggtgctgtttgaggcatttaaaaccgcctgcctgccgaactttcatttgttgcgccaggcgctgccgaaagtcggcaaactgcggaaagtctttttcaactattgccagtattccagccggtatcaacgttacctggatggtgagaatcccaacacctttaatccggcattctctaacggtagtattatggatatcggtttttactgtctggcgagcgcggtggcgttatttggtgagccgaaaagcgtgcaggcaaccgccagtttgctggcaagcggcgttgacgcccagggcgtggtggtgatggattacggtgatttcagcgtcaccttgcagcacagtaaagtcagtgattctgtcctggcgagcgagattcagggcgaagcaggaagcctggtgattgaaaaactgtctgaatgccagaaagtgtgcttcgtgccgcgtggcagccaaatgcaggatctcacccagccgcagcatattaataccatgctctacgaagcagagctgttcgctaccctggtggatgagcatctggtggatcatccagggctggcggtcagtcgcatcaccgccaaactgctgaccgagatccgccgccagactggggtgatttttccggcagatagcgtaaaactataattgccaaagtaaaacagtgtaaaaggtatgtaacagaccattgactggctgaatggtctgtcatactttgttacctgcaaaggggagtaacttcattgccggtcgatcgtcattacgatgtgtgaaaaaacacatccggtcaccgggcaacccgaaaggaatacgcagacgtattccttttttgttgtaagtgagaccttgccggaaggcgaggtctatgcataaaaagcagcggctgacgtcttccgacgttggccgtttttttatgtgtaaggaacttctatgaatactgtcggcacgccgttgctatggggcggattcgctgttgttgtcgccattatgctggctatcgacctgttgttgcaggggcgtcgtggggcacatgccatgaccatgaaacaggctgcggcctggagcctggtctgggtgacgctgagcttactgtttaacgccgctttctggtggtatctggtgcaaaccgaaggtcgcgccgttgccgatccacaggcactggcctttctcacaggttatctgattgagaaaagcctggcggtcgataacgtctttgtctggctgatgttgttcagctatttctctgttccggcggcattacaacgccgcgtgctggtgtatggcgtgctcggggcgattgttctgcgtaccatcatgatcttcactggcagctggctaattagccagttcgactggatcctgtatatcttcggtgccttcctgctgtttaccggcgtgaagatggcgctcgcccatgaagatgaaagtggcattggcgacaagccgctggtgcgctggctacgcggtcatttgcgcatgaccgacaccatcgacaacgagcatttctttgtgcgtaagaatggattgctgtacgccacaccgctgatgctggtactgattctggtggaattgagcgacgtgattttcgccgtggatagcattccggctatcttcgccgtgaccactgacccgttcattgtgctgaccagtaacctgtttgcgatcctcggcctgcgtgcgatgtatttcctgctggcgggcgtagcagagcgtttcagcatgctcaaatatggcctggcggtgattctggtgtttatcggtatcaagatgctgattgtcgacttctaccatattccaatcgccgtcagcctgggcgtggtgtttggcattctggtgatgacgtttattatcaacgcctgggtgaattatcggcatgataagcagcggggtggataatttttaatctgcctaagccgtgtaccctgtcattaacatgagcaccgttttctccctctcccttccagggagagggtcggggtgagggtaatttttcgcaccgatgctggcctgttcccctcaccctaaccctctccccaaacggggcgaggggactgaccgagtccttttttgatgttgtcatcagtctggaagccgcacgttggctttatttttatgtcaaagaaatgtaaccattaagtttcaaaatatgacctctctttaaaatccagcatttttcgcttcccgaagctgtaactttccttatactcgaccttgcaaacactttgttacatcctgaaagatgcgtcgacagaacgcaccagggatgtgcgacaacacaatgaaaggatcgaaaaatgactacgcaacgtagtccggggctattccggcgtctggctcatggcagcctggtaaaacaaatcctggtcggccttgttctggggattcttctggcatggatcagtaaacccgcggcggaagctgttggtctgttaggtactttgttcgtcggcgcactgaaagccgttgcccccatcctggtgttgatgctggtgatggcatctattgctaaccaccagcacgggcagaaaaccaatatccgccctattttgttcctctatctactgggcaccttctctgctgctctggccgcagtagtcttcagctttgccttcccttctaccctgcatttatccagtagcgcgggtgatattagcccgccgagtggcattgtcgaagtgatgcgcgggctggtaatgagcatggtttccaaccccatcgacgcgctgctgaaaggtaactacatcgggattctggtgtgggcgatcggcctcggcttcgcactgcgtcacggtaacgagaccaccaaaaacctggttaacgatatgagcaatgccgttacctttatggtgaaactggtcattcgcttcgcaccgattggtatttttgggctggtttcttctaccctggcaaccaccggtttctccacactgtggggctacgcgcaactgctggtcgtgctggttggctgtatgttactggtggcgctggtggttaacccattgctggtgtggtggaaaattcgtcgtaacccgttcccgctggtgctgctgtgcctgcgcgaaagcggtgtgtatgccttcttcacccgcagctctgcagcgaacattccggtgaatatggcgctgtgtgaaaagctgaatctggatcgcgatacctattccgtttctattccgctgggagccaccatcaatatggcgggcgcagcaatcactattaccgtgttgacgctggctgcggttaatacgctgggtattccggtcgatctgcccacggcgctgctgttgagcgtggtggcttctctgtgtgcctgtggcgcatccggcgtggcgggggggtctctgctgctgatcccactggcctgtaatatgttcggtattagcaacgatatcgccatgcaggtggttgccgtcggctttatcatcggcgtattgcaggactcttgcgaaaccgcgctgaactctagtactgacgtgctgttcactgcggcagcttgccaggcagaagacgatcgtctggcaaatagcgccctgcgtaattaattgtttaacccctttcgtctacggcggaaggggttttctcaactttaaacggatcaattccccttttctgcatccgccagaaacgaatgatattcaggccattcataagcagaaaactaccctcaatcatcgtgccgcctatgctccccgcccagaagttgtgaatcacccagcaacacgtactaaaccacattacgcagcgcatggtcagccctttacagcagaatagcgcccaggtactgacaatcgtgccgataaccggcaatagttcgacaggatgatggaacttcgcgaggccaattccgccagtcagcacaataaaaatcgccattacccataagctgcgcgtgcgtaaggtaatcaatgtacgaatggcattaaggatggcactggcaccagcgggataggtgcccagaagaaaaaaatgtacgccaataacggcgctatagacgctaagctgctttttgaagcgacgttcgtcacgattgaaaaatgttgtgataccaatcagaaaggcgatgacacccacgccctgggccagccaatacgcggtcatgataaatccttagcaggtatggaaaagcaaacggcgcttcacattatgaaacgccgttttttattaacaactcatttcgactttatagcgttacgccgcttttgaagatcgccagttcgcggaagtcgttacgctcgttacaggtttgcttaccgttggcaaactcaacgatggtgtcgataaattcttccagcaactgcggcatcgctttaccgtggatcaactgacccgcgtcaaagtcgatccagtgttttttcttcgccgccagttcactgttggtggcgattttcaccgtcggcacaaatccaccatacggcgtgccacgaccagtactgaacagcaccatatggcagcccgcacccgccagggcgctggtcgctacggcatcgttacccggcgcacttaacaagttcagccctggcgttttcagacgctcgccgtaacgcagcacgtcaaccacgacgctggaacccgctttctgggtacagccaagacttttgtcttccagcgtggtgataccgcccgctttgttccccgggcttgggttttcatagatcggctgatcatgggcaataaagtactgtttgaagtcgttgaccatggtgaccagtttttcaaacgttgcttcgtcgcggcaatggtccatcagcaactgctctgcgccaaacatctccggcacttcggtcagtacggtagtaccgccgttagcaatcacgtagtcagagaaacgccccagcatcgggttagcagtaataccagaaagaccgtcagaaccaccgcactccagaccaaacttcagttcgctgagtttgcctggctcgcgtttatcgttgcgcatcacgttatacagctgatgcaaatgctcgattccggcttcgatctcatcatcctgctgttggcagatcatgaaatgaacgcgttcaggatcgatatcgcccagcgtttcacggaatgcggcaacctggttgttttcacagcccagaccaatcaccagcactgcgcctgcgttcgggtggcgcaccatgttttgcagcatggtgcgggtattaatgtgatcgtcgcccagctgactgcagccgtaggtgtggctgaagaggaacacgccgtcagtaccttcggcgttgttggtctctttcagaaaacggttctggatctgccgcgcgatgccgttgacacagcccacggttggcaggatccacagctcattacgcaccccgacatcgccgttagcgcgacgatagatctgcacttcacgatctgccgcttgcgcaggcagatcctgaaaatcaggttgatagcgatactgatccagatcgctcagattcgtgcgcgtattgtgggcgtgaacgtgaacacctgccgcaatatccgccaatgcataaccaatcggcaggccatatttgatgacattggccccttttgcgatatccgttaacgcaaatttatgtccacgagcaacatcctggcgcagcgtaacagtctggttatcgacactgacttctgtgccttcagccaaatctgctaaagcgaccgcgacgttatccagcgcatggatcttgatgtattgcatatcaaccccagaccttagttcagttcaatggcgaagtagtcacgcgcattgttaaagcaaatatttttcaccatctcgcccagcaggttgatgtccgccggtgcttcgcccgcttccacccagcgaccgatcatctggcacagaatgcggcggaagtattcgtgacgggtgtaactcaggaagctacggctgtcagtcagcataccgacaaagcggctcagcagaccgagctgcgccagttgggtcatctgacgttccataccgtctttctgatcgttaaaccaccagccggaaccgaactgcattttgcccggcataccttcgccctggaagttaccgatcatggtgcccagcacttcgttatcgcgcgggttcaggcagtacagaatggttttcggcagcaggttttcttcattctgcttgctcagcaacttagacagctcttccgccatcggacggtcgttgatggagtcaaagcctacatccggccccagcagtttgaactgacgcaggttgttattacgcagcgcgccaatgtggtactgctgtacccagccgcgacgtgcatattcggcaccaaggaacaccagtaccgcagttttgaactgcgccacttcgtgctcgctcagggtttcgccagccagacggcgcgccagaatgctgtccagttccgcttcgttcgcttcagcaaacatcaccacatccagcgcgtggtcagacactttacagccgtgagcggcgaagtgatccagacgtttggtcagggcagtttgcaggtcagcaaagcggcgaatgtcggtatcggaaacttcgcccagcttcgccatgtagtcgttaaaggtcgcctgttcgatgttgaaggctttgtccggacgccagctcggcagcactttgatggtgaaagagccgtctttggcgatctctgcgtgatgctccagagaatcgatcgggtcatcggtggtgccgaccattttcacgttcatctgctgcatgatgccgcgcgcggagaagttatcctgcgccagcagttcgttacattcgttccagatttcatcggcagtactcggagaaagcaatttgccagtgataccaaacggacggcgcagttcgaggtgcgtccagtggtataacgggttgccgatagtgtgcggaacagtcgccgcccaggcgtcaaatttttcacggtcagacgcatcaccggtacacagacgctcggccacaccgttggtacgcatagcgcgccatttgtagtgatcgcctttcagccagatgtcatacaggtttttaaaacgatagtcttccgcaatctgctgcggcggcaaatggcaatggtaatcgaaaatcggctggtcttttgcgtagtcgtgatacagacggcgggcaaattcggtatctaacaggaaatcttcagtcataaacggagtcattttcgtcttcctctcaacgagtgagctagcttgcttatggtgcgatgctgacaaagttatcacaccaatttccagagtccgaagatattttcgtgagttagatcaataaacgtagttaaaaaaattactctcaaagtggtaaatctcgctgcaggccgcgccagtactggccttgctgtcgtcaggtaatgtccctacaaatattcccacatttgtgatggctctcaccttttaaagttgtatgacaagttatctttctgccgtcgcaaatcataagtcgacggaatgcaaattgccgattcattcatttgttagatgaatcgggttaaccggtacggaagccgaattagcacgaaactttcatggcaacgttcggggcgtgccggttttttttcggttacccggtcgtaactaacatcttcagcctctggcgggatgatggccgcgcttcctgcggatataacaaaacgatgaggttttacatgcgtaaaattaaagggttacgttggtatatgatcgcactggtgacgctcggcaccgtgcttggttacctgacgcgtaacactgtggcggcagctgcgccaactctgatggaagagttaaacatctccacccaacagtattcctatatcatcgcagcctattctgctgcttatacggtcatgcaaccggtagcaggttatgtactggatgtgctgggtacgaaaatcggttatgcaatgtttgctgtgctgtgggccgtgttctgtggtgcaaccgcgctggcaggtagctggggtggcctggctgttgctcgtggtgcggtcggtgccgcggaagcagcgatgatcccggcgggtctgaaagccagctccgaatggttcccggcgaaagagcgttccatcgcagtaggctactttaacgtaggttctagcattggtgcgatgattgcgccgccgctggtggtatgggcaatcgtaatgcacagctggcagatggcatttatcatctccggtgcattgagctttatctgggcgatggcatggctgattttctataaacatccgcgcgaccagaagcatctgaccgatgaagaacgcgactatattattaatggtcaggaagcccagcaccaggtgagcacggcgaagaaaatgtccgttggtcagatcctgcgtaaccgtcagttctggggtatcgcgctgccgcgtttcctggcagaaccggcctggggtacttttaacgcgtggatcccgctgttcatgtttaaagtttacggctttaacctgaaagagatcgcgatgttcgcctggatgccgatgctgtttgctgacctcggttgtatcctcggtggttacctgccgccgctgttccagcgttggtttggtgtgaacctgatcgtttcccgtaagatggtcgtaacgctgggtgcagtgctgatgattggcccgggtatgatcggcctgttcaccaacccgtatgtcgcaattatgctgctgtgtatcggtggttttgcccaccaggcactgtctggcgcgctgattacgctctcttccgatgtgtttggtcgtaacgaagtggcaacggcaaacggtttaaccgggatgtccgcatggctggcaagtacgctgtttgcgctggttgtcggtgcactggctgacaccatcggcttcagcccgctgttcgcagttctggcagtgttcgacctgttaggtgcgctggttatctggaccgtgttgcagaacaaaccggcgattgaggtggcgcaggaaacacataacgatcccgcaccgcaacattaacgtttcgtgtaagttttagtttcccttcaaagccgccttctcaggcggctttttcatcactgcgagtagagctaaactcgcaaaagtggtataacaaatatagtctgccgtatcatgcctggagcgcatatggaaatcactgaaccacgccgtttgtatcaacaacttgccgctgacctgaaagagcgcatcgaacagggcgtctatctggtgggtgataaactgcctgcagaacgctttattgccgatgaaaagaacgtcagccgtacggtagttcgtgaagccatcatcatgctggaagttgaaggctatgtcgaagtgcgtaaaggtagtggtattcatgtggtttccaaccagccgcgccatcagcaggcggctgacaataatatggaattcgccaattacggtccgtttgagttgcttcaggctcgccagctcatcgaaagtaatattgccgaattcgcggcaactcaggtaacgaaacaggacatcatgaaactgatggccattcaggaacaggcgcgcggcgaacaatgcttccgtgattccgagtgggatttgcagttccacattcaggtcgctctggcgacgcagaactccgccctggcggctatcgtggaaaaaatgtggacccagcgtagtcataacccgtactggaaaaaactgcacgaacacattgattcccgtaccgtcgataactggtgtgatgaccacgatcaaatcctcaaggcgctgattcgcaaagatcctcatgctgctaagctggcaatgtggcagcatctggaaaacaccaagatcatgttatttaacgaaaccagcgacgacttcgagttcaatgccgaccgctatctattcgccgaaaacccggtggtgcatctcgatacagccaccagcggcagtaaatgaaattcctgtccgacaggcgctgcaatgcgcctgtttgtctcgtcggtaagcgaaaagtataaagtgtcagcctgtgtaaatcctctcgccaccctcccctgcattcagcaaaatcagactccacggacatgtaattttgataacgaacaacgttgacctttgttacaattagattcaatttgaatttatgtttttgaatgctttcttatctcacgatttaacagggaatagttcaggctgtgttgatgtatcaaacccgcagaacataccaaaacagcaataacattgcggtagtgcatcttttaaaaccagcgtggcgttaaccgattcaccaggaataatgaatggaacttttgacccaattgctgcaagccctgtgggcgcaggattttgaaaccctggccaatccaagcatgattggcatgttgtattttgtcttgtttgtaattttgttccttgaaaacggcttgcttccggcggcctttttaccgggcgacagtttactggtattggtcggcgtgttgattgcgaaaggcgcgatgggctatccgcaaacgattctgctgctgaccgttgccgccagcctcggctgctgggtcagctatattcaggggcgatggctgggcaatacccgcaccgtacaaaactggctatctcatttacccgcgcattatcatcaacgcgcacaccatctttttcataaacacggtttaagcgcgctgttaattggtcgctttattgcgtttgtcagaacactgctgccgacgattgccgggttaagtgggctgaataacgcgcgctttcagtttttcaactggatgagcggtctgctgtgggtattgatcctgacaactctgggttacatgctcggcaaaacgccggtatttttaaagtacgaggaccagctgatgagttgcctgatgctgctcccggtggtgctgctggtgtttggcctggcaggttctctggtcgtgttatggaaaaagaaatatggaaatcgggggtaagggatgcaaatacctcgcatgagccttcgccagctagcctggtccggcgctgttttacttctggtcggcacgctgttgctggcctggtccgcggttcgccagcaagagtctacgctggcgattcgtgccgttcatcaaggcacaacgatgccagacggttttagtatctggcatcaccttgacgctcatggcattcctttcaaaagtatcacccccaaaaacgacactctgttaattacatttgactccagcgaccagagcgccgccgcaaaagcggtcctcgacagaacattgccccatggctacatcattgcgcagcaggacaataacagtcaggctatgcagtggctgacccggttacgggataactctcatcgcttcggataacttcctgttatccgaaacatatcactcactttggtgatttcaccgtaactgtctatgattaatgaggcggtggttaacactaccgcttcgttgtctggacaatcgttcctttgtaataggtccgaatcacaatggaaggttcaagaatgaaataccgcatcgctttagctgtttctctctttgctcttagtgccggtagttatgccactaccctgtgtcaggaaaaggagcaaaatatccttaaggagatcagctatgccgaaaaacaccaaaaccagaatcgtattgacggtctgaataaagccctgagtgaagtccgggccaactgtagtgatagccagctgcgtgccgatcatcagaagaaaatcgcaaagcagaaagatgaggtggcggaacgccagcaagatttagccgaggcgaagcaaaaaggcgatgccgataagattgccaaacgcgaacggaaactggcagaagcgcaggaagagctgaaaaagctggaagcgcgcgactactaactcacaatagtcactacttactcacctggagaaaactatgagcaaagaacacactacggaacatctgcgtgctgagttgaaatccctttccgatacgctggaagaggtgcttagcagttctggcgagaagagcaaagaagagttgagtaagattcgtagcaaagcggagcaggcactgaaacagagccgttatcgcctgggtgaaaccggtgatgccattgccaaacaaacccgtgtcgcggcggcgcgtgccgatgagtatgtgcgcgaaaatccgtggacgggcgtgggcattggcgctgcaatcggtgtagtgctcggcgttctgctgagccgtcgttaattatggcggacactcatcacgcacaagggcccggtaaaagcgttctgggcatcgggcagcgaattgtttctatcatggttgaaatggtagagacacgtctgcggctggcggtggtggagctggaagaggaaaaagcgaatctctttcaacttttactgatgctgggcctgacgatgcttttcgctgcatttggtcttatgagcctgatggtgctaattatttgggcggttgacccgcaatatcgcctgaatgcgatgattgccaccaccgtggtgttgctgctactggcactgattggcggtatctggacgctacgtaaaagccgtaagtctacgttgctgcgccatacacgccatgagttagcaaacgatcggcagctgctcgaggaggagtcccgtgagcagtaaagtcgaacgtgaacgacgtaaggcgcaactgcttagccagatccagcaacaacggctggatctttccgccagtcgtcgtgaatggctggagacaacaggcgcttacgatcgtcgctggaatatgctgctaagtctgcgctcctgggcgctggttggcagtagcgtgatggcgatctggacgattcgccatcctaatatgctggtccgctgggccagacgcggttttggcgtatggagcgcctggcgtctggttaaaacgaccctcaagcagcaacagcttcgcggttaacttccctctggccggagccattccggccttatccctcaaattttttgaagatttttgacagttttccttgctaacaatcatcattcaccacgtttatgattctctccatcgacagcaacgacgctaataccgcgccattgcacaaaaaaacaatcagcagcctgagtggcgcagtggagagtatgatgaaaaaattagaagatgttggtgtactggtagcgcgcattttaatgccgattctgtttattaccgctggctggggaaaaattactggctacgcgggtacccaacaatatatggaagcaatgggcgtcccgggttttatgctgccactggtgattctgcttgagtttggtggtggtctggcaatcctgttcggtttcctgactcgcaccacagccctgtttactgcgggctttacgctgctgacggcatttttatttcacagcaactttgctgaaggcgtcaacagcctgatgttcatgaaaaacctgacaatttctggcggattcctgctgctggcaattaccggtccgggcgcgtatagcatcgaccgcctgctgaataaaaagtggtaagcacgcgctatacttaacgataaaaaacgaggaggaagctcctcgtttttgctattggaggagagaaaaatgggtcaactgattgacggcgtctggcatgacacctggtacgataccaaatctaccggcggtaaatttcaacgtagtgcttccgcatttcgtaactggctcactgccgatggcgctcctggccccactggcacaggcggttttatcgcagagaaagatcgttatcatctctatgttagtctcgcctgcccgtgggcgcaccgcacgctgatcatgcgcaaactcaaaggactggaaccgtttatttccgtttccgtagtgaacccgctgatgctggaaaacggttggacctttgatgacagttttccgggagcaaccggagacacgctctatcaaaatgaatttctgtatcagctttatctccacgccgatccacactacagcggacgagttactgttcccgtgctgtgggacaaaaagaaccacaccatcgtcagcaacgaaagtgcagaaatcatccgcatgttcaataccgcgtttgatgcgctgggcgcgaaagcgggtgattactaccctccagccctgcaaacaaaaattgacgaacttaacggctggatttatgacaccgttaacaacggcgtgtataaagctggttttgccaccagccaggaagcttacgacgaggcggtggcgaaagtgtttgaaagcctggcacgactggagcagattttaggccagcatcgttacctgaccggcaaccagctaaccgaagccgatattcgcctgtggactacgctggtgcgttttgatccggtgtatgtgacccacttcaagtgtgataagcaccgcatcagcgattacctgaatctgtacggttttctgcgcgatatctaccagatgccggggatcgccgaaacagtcaatttcgatcatatccgtaatcattacttccgcagccataagaccatcaaccctacggggattattagtattggtccgtggcaggatctcgatgaaccgcatggacgagatgttcgcttcggttaaaaaaaggcaccttacgaggtgcctctgataattagctaagtgcatgttgttcatgtcggatgtggcatgaacgccttatctgacatacaaaacattgtacattcaatagattgcataacccgcgcagaccagataagcgtagcgcatctggcgattttgcgcttgtcatcagtcttagcgcgccttcacggcactttattaattccttgaacgaatatttactgccatttcattcacgtctattcttaatttgctgctttaaaaacaagtgattgagcaaaattgaggcaaaaatggactggtatctgaaagtactaaaaaattatgtcggtttccggggtcgtgcgcggcgcaaagagtactggatgtttattctggtcaacatcatctttacgttcgtgctggggctgctggataaaatgttaggctggcaacgcgctggtggcgaaggcatcctgacgacaatctacggtattctggtgtttttaccgtggtgggcggttcagttccgccgcctgcacgacaccgaccgcagcgcgtggtgggcactgctattcttaatcccgtttatcggctggcttattatcatcgtctttaactgccaggcgggtacgccaggcgaaaaccgctttggaccagatccaaaactggaaccttaaaacaaatctgctcgccggatgtctgactcatccggcttttatcattatgttgatgaatgaataatttactaatgtttatttaaaatatttcaatgtcgttatataaattacctataaaaaataaccatgtatttatcttaaatatcaaaacctttataacatccgaaaaagaaagatacgaatagcatttacacaatacccggaatagactttcgtcacttttaattaaagggatgtttttatgcagtggtatttgtccgtattaaaaaattatgttggtttctctggtcgcgcacgtcgtaaagagtactggatgtttactctgattaacgccatcgtcggcgctattatcaatgtcattcaattgattttaggtctggagcttccatatctgtctatgctttatttgctggcaaccttccttcccgtccttgcgcttgctatccgtcgcttacacgataccgaccgtagtggtgcctgggccttgctcttttttgttccgtttattggctggctcgtgcttctggtttttttctgcacagaaggtacttctggcagcaatcgttacggaaacgatccgaagtttggtagtaattaatcttagaattggggcgatatttcgcccctttttattaacaataataaatattattttccgttaaaaagtttgggaatttcccgcagacaccaggatttcgcttcccccatactgtcacgacgccaggccataataatatcgatctcgctggtgctttccgggctgacgacacgcaaccgcccttccgcaatatctttttcgaccataggatacggcatcgtcgccacgccaagccccgccagtaatgcctgacgtttatcttcaatcgtgctcaccgttaagcgcggctgtttgtccagcagctgtacggtcaacaccgggcgctcacgagcggtatccgccaccgcaattccacgatatttcacacgcgtcacttcagataacggttccggctcctgatgaatcgggtgatcaggcgcggcaacgtagacgttcattaacgtatagagcttgcggctgttgatctcgctgctggaacgaaaatgcatatccggcgcgataacaatatccgcccgcccctgctccagccgttcccacgcccccgccagcacttctgtgatgattgccagttgggtattggcttttgccgccagtttgtcgattaacgggaaaaaggcaggtgtcggtaccagcgcttcggtcacaatggtgagatgcgtttcccaaccgcgcgcgagagcttccgcatcagtagtcagtttatctgcggcttccagcaaaacgcgccctcgctccaacaacatcctcccgacattggtgaatttggtacgatggccgctgcggtcaaacagcaccacatccagctcttcttccagtttttgcatggtgtagctaagtgcggaaggcacgcgtcccagctcatccgccgccgccgcaaaactgccccggcgatcgatcgcatccataacccgtagtgcttccagcgttaatgccctttctttggccatttcgttctcattcaggaaatttgaacataccgggcagaatatctggctaacaatgtagcgtccagccccttaccataaaaggaagtaaagagaggtcaagaattatgattactacccgaactgccaggcagtgtggacaagcagactacggatggttgcaggcccggtatactttttcctttggacactacttcgacccgaaattgttaggctatgcctccctgcgtgtgcttaaccaggaagtgctggccccaggtgccgcctttcagccgcgaacctatcccaaagtcgatattttaaatgtgattctggatggagaagcagagtatcgcgatagcgaaggcaatcatgttcaggccagcgccggagaggcgttgctgctctctacccagccgggtgtcagctatagcgaacacaatctcagcaaagacaaaccgttaacgcgaatgcagctttggctggacgcctgcccgcagcgagagaatccgctgattcaaaagctggcgcttaatatgggcaagcagcaattaatcgccagcccagagggtgcgatgggaagcctgcaattacgccagcaagtgtggctgcaccatatcgtgctcgacaaaggcgaaagtgcgaatttccagttgcatgggccacgcgcgtatttgcaaagcattcacgggaaatttcatgcgcttacgcatcatgaagagaaagcggcgctgacctgcggtgatggggcgtttattcgtgacgaggctaacattacgctggttgccgattccccactgcgcgctttgctgatagatttgcctgtctaattgtttttacagggagatgatgatgagtaaaaaattggccaaaaagcgccagccggtgaagcccgtggtggcgaaagaacctgctcgcaccgccaaaaattttggctatgaagagatgttgagcgagctggaagctatcgtcgcggatgctgaaacgcgtttagccgaggatgaagctaccgcgtaaagacaggttgccggatgcggcgaaaacgccttatccggcctacaaaatccaacaacattaacgaattaaacaacccgtaggccggacaagatgcgccagcatcgcatccggcacgatccccaaaacctggcgtttatctggccttgctcgccataatctcgataatctgccgatccgtttgctgcatgctatggcttgctaacgcacacaggttggcaatgctctgctcaacatcatgcgccacaatcccttcattgccggtcacggcggtatcatccagcgccattaacaccgctttccacgcagcgctagcactggtgctaaccttcatcgcgcagctgttgctcgcaccatcgcaaatcatgccgctgacatcgccgatcatactgctgatcgccatgctgatggtttcataacgcccatccaccagccatgccatcccggcggcggcccccattgctgcggtcgttgcggcacacagcgcagacaaacgcggtaactggttatggatgtaaattgcgctcaaatggctaagcatcagcgcacgcgccagccgttcatcatccgctccgaagtgttctgctaccaccaccacaggcattgttgcggtaatcccctggttaccgctgccggagttactcatagccggaagcgtagcgccgcccatacgcgcatcggatgccgcgctggtacgaatcacaatggaactagagagatctttcgccagcaaaccgcgctcgcactgtttttccagcgtcgcgccaatatgcagcccccacttaccgctcaaaccttcctggcttaacgcacaatttagcttcgcggaatcgagaataaagcggatcgccgcaaacgggacttcattgacgaacttcaggatctcagccagcgtcgttctggaaagcaccgtcagcggagactcttgctcgccctctgccacacacgcctgctgggtaaacaccacaccatcgtgcgtctcgatatgcacaatgttggtatgcccgccgacgatggtgacacacgcccacttctcaccgttccagactttggcgcgactgaagaggatttcatcgcaaggttcctggatcttaacggagactttccccgccgccagcagtgctttggcatcggcaattgcctgcgctgttgcgtctttcagcacttccagcccggcgttggcatttccacctaacgcccccagcgccgccgcaatcggcagccccaccattcccgtgccgggaacggtgacgcccagaccgttcttcatcagatttgggctaacccaggcttctacacgttcaaccggaccttccagttctgccgcagcaaccgccgccgccagcgccagactaatcggttcagtacatcccagcgccggttttacttcctcctgaacggcgaggatgtaacgctgccataacggatttaaagtgctatcaaacatattaaaaaccttaaaatttcaggtaaatcaagaaaatgccaggaacggagaaacacacagcaacaaaccagtgacgataatcaggtacagagacatccctttgtatttgtgcaatgctggtactttgtaaaccagccacgccgggatcaggcaccctaccatgccgaaaatcgggctacagatagaggtgaagctcaacaccggtgcgttcagtacgatggcgctccaggccagcaaaatggcgaaaatcatgatgccgcgctgaacgagattttcgttaatcttctcggcaggcatcttgcgacgcaggatgttcattacgatcccttgcgttgcttcgcgaaagcctaaatagacgccaaagaatgcagtcatgacagcaaagatattgagaatgacgctgaccactttcacccacgctgcgccgtcaccgctaataaactgtgcggcaatcgccagcgcggaaatattctgctcataggcttttaccgcttcgtcatgtcccatcgccagcgtgaagctcacggcgtagaaaaagacggtgacaaacaaaatgccaaacgcgatattcattgcccgcaatgctttatgccgcgccacttcaatacttttttcccggctgcgataagagatcaccatcggacttaacgtctggataaacagaatgctcgtcagggtaaacggcagcgtaataatggcgtttttcaccagcagccccagcggcggtaggctaccgacgttatacagatgccacattcccaccatgctcacgcccagcgccgcgaccaccagcagcttggtcagcaccatgccggtgctaattttgaataacaatttctcgccgcgactggagatcgccaccagaatgcaaatcagtaccagaccataaaagggactgtcactcagcaacccttccgtcacgccgaaggtatgcaggtaggaagcactatcgttggtgatggcggtggaatagacgaacatccaaatcaccagcattacgaaatagagcgcacctaacaggatgccccagtttttacctaaataaccgctaatgacgctcgggtaatctttacattctggactttctgccagcgtattaataaacaatcgctgaaacagatacattgccgggtaaccaatcacgctactgagcaaaaatacccacaatcccatcaaaccgacctgcaccgggagaaaaacaatccccgcgccaatcgccatcccgatactcataatcacccagccggtgtcagtactgtcgaatttgatcgcttctcgccactcgctctcactcattccagcacgacccgccggggtcgaagcgtctgcaatgacgcctttattcgatgcaatttccataatttctcgctcaatattttgtagggcttattatttttttccgagccgcatcaaggcgatatgcggtctacgtttttgcaggcgagttattagaataaagaaatgatacgcgcgaggtcagagaaaatcttcacaatcaagactttgaaataacggagatggataagaattttctactaaattaatcgcaggagaatattcattctctatttgcggcagatcacaaaaaaaaggtgcacatttgtgcacccaaggatgaaagctgacagcaatgtcagccgcagaccactttaatggccagtcctccgcgacttgtttcgcggtatttatcgttcatatctttgccggtttcatacatcgtctcgatcactttatcgagactaacacgcggtgcgctggtgcggcgcatcgccatccgcgcggcgtttactgctttcacggcattaatggcattacgttcaatgcacgggatttgtacctgtccggcaaccggatcgcaggtcagcccaaggttatgctccatcgcgatttccgccgcattgcatacctgcgccggactgccgcccagtagttcagttaaccctgccgccgccatactacaggccacgccaatctccccctgacagccgacttccgcgccagagatggaggcgttcattttatacagcgcgccaatagcccccgcggccagaaaatagcgggcaatactccgctcgtttaccggacgacggaacttatcgtaataagccagtactgccggaataatgccgcacgcaccgttagtcggtgccgttaccacgcgcccgccagctgcgttttcttcactaaccgccagcgcgtacatgttgatccagtcgatgacattcatcggatcgttagagatgttatcgctggaaaccagctgacgacgcagcgctacggcacggcgcggcacattgagcggaccaggcagcacgccttcagtgttcatcccacgttcaataccgtcatgcatcacttgccagatacgggcaaaaccggcgtcaatttccgctttgctgcgcagcgctagctcgttgtgcatcatcagaccagatatagacaggccgttgtaatcacacattttcagcagttcacctgcactgtggaaatcgtaaggtacggacgtttcgacatcgtggctcaggccgaagtgttcttcttcgacaataaacccgccgccgacagagtaataggttttacttaatagctcttcctgtcccttccaggcagtgatccgcattccgttctcatggcgaggcaacatttcgggatggaagataatgttctttgctacaggaaaatcaacaatatgcgcaccagatgccactggcagccgcccgctgcgcgttactaactctataaatgcagggatctcatcaatgacaacatcctgcggactgtttcctgccagtcccatgatgatggcgacatccgtggcatggcctttgcccgtcagactcaagctcccgtacagatcgaccacaatatggctcgtcgcggttaataagccgctactttccagccgatcaataaaactttttccggcattcattggccccacggtatggctactggagggaccaatcccaattttgaaaatatcgaatgcactaatcatatccacaccctcggattgccgttcagtgaagtggagcggaacgaccttacgaccgtcccgctcacgaggctttacgcactacgtactgcgatggcttcaatttccagcttcacatctttcggcaaacgcgcgacctgcacacagctccgggtcggataggtcgcctgatgctcatcgaagaactgcttatagacttcgttgatggtggcaaaatcattcagatcggtgataaacacggtcatcttgatgatatcgcccacgctcagcccggcagcaaccacgatcgctttgacgttttcgaggcttaaacgcgcctgatcttgcacatcagccgggatctcaccggtctgtgggcaaaccggtatttgcccggaggtgaagaccatgctgcctaaatcaacgccctgaacataagggccgattgcgcctggggcacgttgcgtttcgataatctttttcatacatcctccggcgtcagagcgcctgggtaaaggtacgactaataacatcctgttgctgttcacgggtcagtgcgttgaagcgcacggcgtagccagagacacggattgtcaggttaggatatttttccgggtgctcgatggcatccagcagcatttcccgattcattacgttgacgttgaggtgttgaccgccttcgacatccgcttcgtggtggaaatacccatccagcaggccgacaaggttggttttacgtactggatcttctttgcccagcgccgcaggaacgatactgaaggtgtagctgatcccatctttggcgtaggtgaacggcagtttcgccacgctcgtcaaactggccacggcacctttgcggtcacgaccatgcatcgggttagcgcccggcgcgaacggtgttccggcgcgacgaccgtccggcgtattaccggttttctggccgtacaccacgttagaagtgatagtcagaatgctctgggtagggacggcgttgcgataggttggcagcgctttaattttcttcataaagcgttcaaccaggtcgcaggcaatgctgtctacgcgctcgtcgttgttgccgtactgcggatattcaccgtcgatttcaaagtccaccgccaggccgttttcgtcacggattggtttcacgcgggcatatttgatggcagacagggagtccgtcgccacgctcaggcccgcgatgccgcatgccatagtgcgatagacatcacgatcgtgcagcgccatcaggctagcttcgtagctgtacttgtcgtgcatgtagtgaatgatattcagcgcgctgatgtactgcaccgccagccagtccatgaagtgatcgaggctgtccatcactttgtcgtaatccagcacgtcgtccatcagcggtgctgttttcggcccgacctgaatcttcagcttctcgtccaccccgccgttaattgcgtagagcagcgttttcgccaggttagcgcgtgcaccaaagaactgcatttgcttaccaatcaccattgggctgacgcagcaggcaatcgcgtaatcgtcgctgttgaagtcagtacgcatcagatcgtcattttcatactgcaaggaagaggtgacgatgctcacctgcgcggcatattttttgaaggcaatcggtaattcttcgctccaaagaatggtcaggttaggttccggtgccggccccatagtgtgcagggtgtgcaaatagcggaaggagtttttggtcaccagcgtacgaccgtccagccccatcccgccgatcacttccgtcgcccagattgggtcgccggagaacaggctatcaaattccggtgtacgcaggaagcgtaccatacggatcttcatgatgaagtgatcgatcagttcctgtgcctgctgctcattgagtacgccagctttaaagtcgcgctcaatgtagatatcgaggaagcttgccgtgcggcccaggctcatcgcgccgccattttggcttttcactgccgccagataagcgaagtagagccactgcaccgcttcctgcgcattctgcgccgggcgagagatatcaaagccatatttcgccgccatttcctgaatctgcaacagcgcatgacgatgctctgccagctcctcacgcagacggatggtggcttccagatcctcgcctttttccagacgagactggagatcggcaaattgcagttcgcgttcacgtaccagataactgatgccatacagcgctacgcggcgatagtcaccgataatgcgcccacggccatagccatctggtaaaccggtcagcacgccagatttacggcagcgcagcatatccggactgtaaacatcaaatacgccctggttatgggttttacgcagatcggtaaacagatattcaaattcactgtccatttctcggccataggcgtggaaactacttttaatcatattaatgccaccgaacgggtgtagcgcacgtttcaacggcgcatccgtttgcaggccaacaattttttccagcggctggttaatatatcccgcatcatgagcggtaattgtggtggcaatattggtatcgaaatcaaccggcgcgtgggttgcattttcgatacggatgccttccattactttttcccacaattccgtggtggcaggcgtcgcttcggcgaggaaagattcatcgccttcatacggtgtatagttatgttgaataaaatcgcggacattaatttcgtttttccagtccgtacctttaaagccaagccatgcgtcggcgtacagcttatcgctggtatcaatatctaccttcatgaaaaataatctctctacaatacttcaactaaattatgcaaattctgcgggcgcgttaactttgcctaaatgaatggcatccaaagcaatcattttttcttcgttagtcggaataacggcacaaatgacacgcgcattttcactggaaacaattcgctcaccacaggagttagagcgattattcatttctgtatcaatctctaagcctaatacagccaaatgttccatgaccagacgacgaattaagctactattctctcctattccgccggtgaatataattccatccaggcgacgtaaactagctgcgtgtccggcaatatgacgggcaattcggtgaacaaaggttttaattgccagttgcgcgcgttcgtgaccttcatgccaggctttttccagaacacgtaaatcgctagaaagaccggaaatacctaataatccgctctctttattcactacgcgttccaggtcacccaggctctggttggtttggctggcgacccaggacatcgcaccaaagtcgacatcgccactgcgggtacccatcatcaagccttccagcggcgtcattcccatactggtatcaacactctgaccgttgcgaaccgcgcagatactcgcgccattgccaagatgcgccacaaccaggccggagtcatcttccgccagattcagcaggctatgtgcgcgctgggaaacatagcggtggctcgtgccgtggaaaccataacggcgtacacctaactcttcataatatttccacggcaggccgtataaataagcttccggagccatcgtctggtggaaactggtatcaaataccgccacctgagttacgcccggaaataattgctgcgcgctttcaataccacttaaattggcgtaattatgcaggggtgccagtggagaaacgcgacggatattatcaatgacttcatcggtaataatggcggactcggtaaaaatactgccgccgtgagcgatgcggtggccaattaaggccacactgtcatttaaattccgtttttccagttcaaatgcaattgccttcaatgcaccttcgtagctgtggtgagccagcggtgctggctctcccccatttacggataagaatgcattttcgctgttaataccgtcggcaataccactcattaatacttcacagtcgctggcatcgagcacggaaaacttaatgctagagctaccacagttaataaccaaaacaaccggaaattcattcatctcttttctcatcctgagttacggattaaaacagtttgtatacgatgttcaggatggtcagcagaccaatcacggtaacaaacacgttatccagacgaccacggtatttcgccagagacggcgctttacggatggcatacatcggcaacaggcacagcagggatgcgataatcggtgcgcccatggcttcaatcaggtcaaggatgttcgggttggcgtaggcaacaacccaggtggagcccatgatgaagatcatgctgatagtgttcagtttacccaggctcactttagttttgtcgcctttataaccaaacttcaggaccaggccattcagaccttccagcgttcccagatagtgaccgaagaaagatttgaagatagccacgagtgcgatgatggaagccgcatattccagtgtaatcgcgaacgttgttttggtaccggtcatggacgcaaagtggttagccagataagaaagcactggaatattctgcgctttggcttccgccatgttggccggagacagagtaaacaggcagctaaaggcaaagaacatcaccactgcaaccatcagcatgctggcacgagaaatgatttgggaacatttacgttcggtgaagtcgcgaccgaagtctttctcatactcttcacgcttagaaaccacgaaggaagagacgattgggctgaagttaaaggagaaaaccatgatggaaatccccagccagacagtgatcaggataccgtcatgaccggttaagctcaggctaccgaggtcaacctggtcgataactgcagagttccagtaagggatcaggctcaaagaaatcagcaccaggctggcgataaacggccataccaggtagctcatcactttaaccatcagatccttaccaaaccagatgacgaaagccatcagcagcaacaggaacagcgccacaaagccgcgattcagcggtgcaaagccgagctggttttcccagaacgtcataaaggtattggtaatagtaacgccataaatccacagcagtgggcaaatcgcgaagaagtacaggaacgtgataaccacgccgccagttttaccaaaatgctcttccaccgtttccgtaatgttgccggaagggttagagccagaaagacacagacgcgccagcgcccggtggcaataaaacgcgatggggtatgccaataccaacatcagaagaatcgggatcagtccgccaaaacctgcgcggatagggaagaacagcaccccggcgccgattgccgtaccaaacaagcctaacgtccatgtggtatcacttttacgccaggagctttgttttgtctggctggatacaatgctatcactagtactcatatcctatcctcaacgaattaattaagcgtcaacgaaaccggtgatttgagagacgcgagaaagatcgatattgccgccggaaataatactgacggtttttctgttttgaatatattggtctaatttaccgcttaataatgcagcacatgccagagcgcctgcgccttcggtgacgactttattgcgctgaattaaggcaatcatactgtttctgatttcgtcttcgctgaccagcacgatgtcatcgactaattcacgaacgatttcgtaagttaaattacccgggcgggagacatcacaaccatccgccagggtgccggtagttcggtgcgtggttatttctccggagtggaaagaagccgccatgccgtgaacgttttcagactgtacgccaataacacgaatggtcgggttaatagatttaattgccaccgcaataccagcaattaaaccgccaccaccaattggcacaatcacgttatcgacatcatagagatcttccataatttccagaccaatcgttccctggccagcaatcactttcggatcatcgtaaggtgggataaaaatacggccttccatttcgacaatttcgctcactttagcgatagtgtcgttgaagttatcaccatgcagaacgacttctgcggagtagtcgcacgttgccgctactttggattttggcgcaccttttggcatcaccactttaccgtcgatacccagcatcgcgcaggagagggaaaccccttgcgcatggttgcccgcagaacaggccaccacgcctttgcgtttttccgcatcggtcagactacttaatttattaaatgcgccacgaattttaaaactacccgtacgctgcatattttcaaacttcaggaatatttcacctttgcaacgttcactaaaatagttggagcgaggcatgcctgttttataaattcgcccagccagtcgttgtttcgcttcaataatgtcatcaatagcaaccggcagatcgtatgtaatatgcattataaaacctcttcgcctgaattaaatatgtaggtaaccgtaaccgacacctgcaagacagacaggtggattatttatgtttaaataaaaacaaataattaaccaacttctattaattgccttcgtctacacccattataagaactatactctttggctaattccaccaaaacgcttgctgcttttttaatacgataatttttgctccataccgcggcatattgtgccacaggtaatgtttcttcaaccggaatagtaataaattgattagaaccaaaaggactcgtcatatcacaaggaattacagttaagaaatcagcattgagaacaagattataaattgtcacgacactgtcggttttaacgatgttttcaatactgatgccatttctttgtaacgtagtaagcagttcgctgtagtaccccatattagtttgtggcaacacccactgttcgttcttcaagctctccagcgtggtggtgccggtgcatgttcgggacttactggctaccagcacaaactcggactcgaacagcggctcaacatgtaaatcctgaagcttcatttctgcacttaacgtaccaatcgcaaaatccagtcgaccgtcgcggattgccggtaagaagctagacagttgcgcttcatacatagaaacctgcgctttcgggaacacctctttgaacttgttgatcatcccactcataaaagtaaaaccaatcaaactaggaaaaccaaaactgacttccaccaccgcctcagaagacataccgcttatctcattaaccatatttttcatttcacgggtaatggattcggaacgggagagtaacaattgaccggcaggtgttaatgttacaccggtatttttccgcaccactaattccacaccaaaataatcttcaatatcgttaatgattttactgacggccggttgagttaaccctaattcttttgcagcgctgccgatagaaccacttctaatgacttcctgaaagactaccaggtgctgcgttttcggaagaagaatagtgctcataacgacctacgttaattacctcattgacggcatgaagtgtatcaaaatgaaatgaacaggatatgtgcgaccactcacaaattaactttcaatactttccagagtatcgttattacaattaaatacctttaaatatcaacaagttaaagtataaaaatcagcataaaccctgatttttgtcaaaaaaaatgacggggataaccatattttatggcgataacatcattcgttatgtggttaatacaaaaaaggggctgagaccatatttcaagcaattaccggataattaccaggcaaaatttgagttaaatttaatgagcaagttcagtaattttattataaataaaccatttagtgtgataaataatgcggcatgtcacatttttagtcgctatttgttggagaacaaacatttattttatcaatattttaaaattagcaatacatgtattgatcatctcgaacaattgattaacgtcaactttttctcttctgacaggacgagtttttgtgaatgcaatcgttttccataaattcttctcccctcataggcgacgaatagcattttgtgttgaggatcacaaaacgaataattgctgatcgccgcgataaggtcagacaaagacaacaagggaaattttcacagagcttttgatcggcgtaggccacagaatgttgcttcgtttactgtaacgccgggtaaatgagcgttttttgatagtgcgaaagaaccctgcgaggaaaataagcatctattattgtttgtcatgatgacaaggcaggcatcaatgaaaggcttcccaattgcgcatatttttcaccctagtatcccgccaatgcacgcagtggttaacaatcacaatagaaatattgattattggacggtaaaaagaaagtttgcagaaattgtctccaccaatgacgttaataaaatttacagtataagtaatgaactgcggagagtattatctgcaataactgcattgaatttctatcatggcgatgttccttctgtcatgatccgaatccaaccggaaaatatgagtccattcattatagatatttctacaggagaacatgatgattatatcatacaaacattagatgtaggcacttttgcaccttttggtgaacaatgtacttgcagtgccgtcaataaaaaagagctggaatgtattaaggagacgatttctaagtattgtgcaaaattcacccgaaaagaagccatcttaaccccccttgtgcactttaataaaaccagcattactagtgattgttggcaaattctcttttttagtcccgatcattttaataatgatttttattgattatttataaaggataaaataatgttccctgttagtagtattggtaatgatattagtagtgatttagtccgtcgaaaaatgaatgaccttcctgaaagcccaacaggaaataacctcgaagcactagcaccaggtatagaaaaactaaaacagacctctattgaaatggtcactttacttaacacgttacaacctggtggaaaatgcattatcactggtgattttcaaaaagaattagcgtacttacaaaatgtaattctttataatgtcagctctcttcgtctggattttttaggttataacgcccaaattattcaacgaagcgacaatacttgtgaacttaccattaatgaaccgttaaaaaaccaggaaatatccacaggtaatatcaatattaattgcccattaaaagatatttacaatgaaatcaggaggttaaacgtaatttttagttgtgggactggagatatcgttgatctatcctctctggacttacgtaatgtcgatttagattattatgatttcacagataaacatatggctaatactattttaaatccttttaaattgaatagtacaaattttactaatgccaacatgtttcaggttaattttgttagtagtacacaaaacgccacaatctcctgggattatttactaaaaataacgcctgttttaataagcattagcgatatgtattctgaagaaaaaatcaagtttgtcgaaagttgtttaaatgagcctggagacattaccgaagaacaattaaaaattatgagatttgcaattataaaatctataccaagggcaactcttacagataaattagaaaatgaattaacaaaagaaatatataaaagcagtagcaaaatcatcaattgcttgaacagaattaaattaacagagatgaaagaattcagtagtgaaaaaatatatgattacatcgatataatcattgaagattatgaaaataccaaagaaaatgcttatctggtcgtcccccaaattaattatactatggatttaaacatagaagactctagcagtgaagagttacttagtgataataccctcgagaaagacgaaaattctccggacaatggctttgaggtcggggaatataacacatatgaagcatataacagtgagaagcaatattttaccagagaggactatacgtatgattacgaccttttaaatgcaatataaacttaataacttcttacaaagtctattattaataccgtagatatttattcatcttaccctgtgcaccaaaagcaaaaactcactgacgcgggtttgaaactgatggcaaccgcaaaaatgcctgatgcgctacgcttatcaggcctacgccatctctgcaatatattgaatttgcgtgcttttgtaggcaggataaggcgttcacgccgcatccggcatgaataaagcgcactcaacaatctgaaacccgccggaacggtttattacgtacatcaggtaaaactgaccgataagccgctttcttttgggtatagtgtcgtggacagtcattcatctttctgcccctccaaaagtaaaaacccgccgaagcgggtttttacgtaaaacaggtgaaactgaccgataagccgctttcttttgggtatagtgtcgtggacagtcattcatctttctgcccctccaaaagcaaaaacccgccgaagcgggtttttacgtaaaccaggtgaaactgaccgataagccgctttcttttgggtatagcgtcgtggacagtcattcatctttctgcccctccaaaagcaaaaacccgccgaagcgggtttttacgtaaatcaggtgaaactgaccgataagccgggttctgtcgtggacagtcattcatctaggccagcaatcgctcactggctcaagcagcctacccgggttcagtacgggccgtaccttatgaacccctatttggccttgctccgggtggagtttaccgtgccacggactgttaccagccgcgcggtgcgctcttaccgcaccctttcacccttacctgatcccgcttgcgcgggccatcggcggtttgctctctgttgcactggtcgtgggtttcccccccaggcgttacctggcaccctgccctatggagcccggactttcctcccctccgcccgtctcccccgaagaggacgacgacgaagcggcgactgtctggtcagcttcggcgcgcagtatagagggtttgcgcgcccttgtcaccccgcgttgcgcattccaatcgccagtgtcgcggcgatattacgactagcacggcagatattgtcataagccccgcggaatgcttcgtccaacgtacctatgctggtcaatacgctgaagaccgcatcaatgccatgctgatgtacaacgccaacatcatcggtcaggctacccgcaatgccaatcaccggtttatggtacttcttcgccacgtttgcgacaccaatcggtaccttcccgtgaatactctggctgtcaatacgcccttcaccggtgatcaccagcgtacaatcgtgaatatgttcctccagattcagcgccgtagtgacgatttcaataccacttttcagttccgcaccaagaaacgccattagcgccgcgcccataccacccgcagctcctgcaccggggacatctttcacatcaacatgcagcgcttttttaatgacctcggcatagtgagagaggttattgtccagctcaacaatcatcgcttcactggctcccttttgtgggccaaagatgcggcttgcgccgttatcgcccaccagcggattggtgacatcacaagcgacgcgaatgacgcaatcttttaagcgcggatcgaggccggaaatatcaatatcattcagagtattaagactaccgccgccaaaaccaatttcattgccgttggcgtcgcataatttcgcccccagcgcctgtaccatgcctgcgccgccatcatttgtagcgctgccgccaatgccgataataatgtttgtcgcaccgctctccagcgcctgcaggattaactcgcctgtgccgcgactagtggtcacgagtggatcgcgtttttccgcaggtaccagctccagcccactggccgccgccatttcaataaacgcggttttgccatcgccggagatcccccaactggcattcactttctcgcccagcggccctgtaacccaggcgtgacgttcagccccctgggtggctgcaatcatcgcttccaccgttccttcgccaccgtcggcaaccggaacagaaacgtactgtgcatcaggaaaaatttcccgaaatcctttttctatcgcctgcgcaacctcgctggcagataaactttctttataagagtctggggcgattacgattttcatacctatgcctgttaccacatgacgccggagggcgtttctcttattcggcctggattccaggcccggattgcaatacgccatccgggcacgacgtcattaacgagtaacttcgactttcgccagtttttcgtagtagcacgccagggcgctatgatccgccgttcctaaaccatctgctcgcagtgcctgcatcatctccataaccgcagctgtgagcggcagttgtgcgccgacgccgtgagaagtatccagcgcattcgccagatccttaatatgcagatcaatacggaagcccggcttgaagttgcggtccatcaccatcggcgctttggcatccagcacggtactgcccgccagtccaccgcgaattgcctgataaaccaggtccgggttaacgcccgctttagttgccagcgttaacgcttcactcatcgcggcaatattcagcgccacaatgacctgatttgccagtttggtgacgttacctgcaccgatttccccggtatgcaccacggaacccgccatcgctttcatcaaatcatagtatttgtcgaaaatagccttgtcgccgcccaccatcacactcagcgtaccgtcgatggctttcggttcaccgccgctcaccggagcatccagcatatcaatgcctttcgctttcagcgcttcgctgatttcacggcttgccagcggtgcgatagaactcatatcgatcaataccgtacctggcttcgcgccttcaataatgccattctcacccagcgccacctctttcacatgaggggagtttggcagcatggttatgatgacgtcgcactgttcagcgatcgctttagccgtagacgctgtttctgcacctgcagcaatcacgtcagcaatagcttctgggttacggtcagcaaccaccaggctgtaacctgctttcagaaggtttttactcattggtttacccataatccccaggccaataaaaccaactttcatagtcatatcaatcatctctcttgttgcggtggtggttattttttaaaggtatcagccagtttctgagtggcagagcggaagacgccgagatcgctgccgacagccacaaacgtcgcgccccattccagataacgacgcgcatcggcttcgaccggcgcgaggataccgctgggtttgccgtgcgcgctggcacggttaaaaatgtgctgaattgctttttgtacatccgggtgacttgcattgccgagatggcctaatgccgcggccagatcgctggggccgacgaagatgccgtctacgccttcggtagcggcaatggcatcgacgttatctacgccctgctgactttctatctggaccagaatagtgatgttcttgttgctctgagcgaaataatccgccacggtgccaaacatattggcgcggtgagaaacggagacgccgcgaatgccttccggtgggtaacgggtacttgccaccgccagctctgcttcctcttttgtttctacaaaaggaatcaggaagttatagaaaccgatatccagaagacgcttaataattaccggctcgttggtcggcactcgcactactggcgcgctggcgctgcctttcaaggccattaactgcggaataaacgtggagatatcgtttggcgcatgttcgccatccagcaccagccagtcaaacccagccaaaccaagaacttcagtgctaatcgggttagagagtgcactccagcaaccaatttgtacctgtttcgcagccagtgcggctttgaatttattcgggaaaacatcgttattcatcgcttatacctttgcttatttctgcaattccatacgtttaatgtcgccaactacgaagaggtagcagaccatcgccatcagcgcactacatcccacgaaaaccagtgctgcattgaaggagtgcagttcacttaccaggtagccaatcaccagtggagtgacaatggaggcaacattgccaaagacgttaaagacgccgccgcagaggccaacaatctctttcggcgcggtgtcagaaatcaccggccagcccagcgcaccaaatcctttgccaaagaaagccagcgccatcagcatgaccaccagcgtggtgttgttggtgtagttacataagatgatggtggaagccagcaacattcccagcacaatcggtagcttacgtgccagggtcagggataaaccgcgtttgatcagataatcgctgaagacacctcccagcacgccgcccgcaaaaccacacagtgctggaatgctggcgaccagacccactttcagaatgctcatgcctttttcctgcaccagataaatcgggaaccaggtgaggaagaaccaggtgatggtgttgataaaatattgtccgaaaaatacgcccagcatcatgcggttagagagcaattgcttgatgtaatgcagtttgggtccgcttgctgccgcactgcccggctttttgtggtccatatcgaccaccgcgccattttcagagataaacttcagctcttccgcagacatacgtgggtgatctgtcgggttatgaatcaacttgatccacagcgccgtcagcacaaaaccaatcacccccataacggtaaagacgtgctcccagccccaggcgaaagtcagccagccaagcagcgggctaaagagcgccaggctgaaatattgcgcgctgttaaagatggcggaggcagtaccacgttctttcgtcgggaaccaggcggcgacaattcgggcgttcgccgggaaacttggcgcttcgctgaagccgagcataaagcgcataaagaacatggagatccctgcccaggccagcgggaacatatcaacaaagccttgcaggaaggtgaataggctccagaaaaagaggctgtaggtgtaaacttttttgctgccaaacttatcaagcagccagccgccggggatttgcatcagcaagtaggcccagccaaaagcggagaagatgtaacccatgctaaccgcacttaactgcaactcttttgccacttcggtaccagcaatagacagcgttgcacgatcggcgtagttaacggcggtaacaataaaaataatcagtaatattaaatagcgggtatgcacgcctttctttttttcgtcaacggtgtccagaatcattttatttacctcgggtacttatgctgatttttattattatggggaaggtgttatttatgagtttcatttatgccgtaacgacaatgaactcgggaattagtataagcagcgcgagaataataatcattgtgcaaatgctaatttaattaatactatttaaatattattttgagcatatgcacataaggttgcgcgctaaagcacagatttgcgctttaccttaccgggcggcactgcaatccctgaaatgattgacattgatcacatttctgcgtttaaactcctgacattcttatttcacccaatgaagtcatttatttttaaatgagaccaggtcctcattttaataacccctggctggagaatattgcacaatggccaacatcgaaatcagacaagaaacgccaactgcgttttatataaaagttcacgacacagataatgtggcaattattgttaatgataatggcctgaaagcaggaacgcgttttccggatgggctggaattaattgaacatattccccaggggcataaagtcgcattgctggacattccggctaatggtgaaattattcgttatggcgaagtgattggttacgccgtgcgtgcaatcccacgcggaagctggatcgacgaaagcatggttgtactaccggaagcgccgccgttacacacgctgccactggcaaccaaagtcccggaacccttaccgccgctggaaggatacacctttgagggctatcgcaatgccgatggcagcgtgggcaccaaaaacctgctcggtatcaccaccagcgtccactgtgtggcaggcgtggtggactatgtagtaaaaatcattgaacgcgatctgctaccgaaatacccgaacgtcgatggcgtggtggggctgaatcatttgtacggttgtggcgtggcgattaacgcaccggcggcagttgtacctatccgtaccattcacaatattagcctgaatcctaactttggcggcgaagtaatggtgattggcctgggttgtgaaaagttgcagcctgagcgcctgctgactggaacggatgatgtgcaagctattccagtagaaagcgccagcattgtcagtttgcaggatgaaaagcatgtcggttttcagtccatggtcgaggatattttgcagatcgccgaacgccatctacaaaaactgaatcaacggcagcgagaaacctgcccggctagtgaactggtcgttggtatgcagtgcggtggcagcgatgcgttttctggtgtaacggcaaacccggcggttggctatgcgtctgatctactggtgcgctgcggcgcaacggtgatgtttagtgaagtaacggaagtgcgtgacgcgatccatctgctgacaccacgcgcagtgaacgaagaggtcggcaaacggctgctggaggagatggagtggtacgataactatctcaatatgggaaaaaccgaccgcagcgccaaccctagcccgggcaacaagaaaggcggtctggcaaacgtggtagagaaggcactcggctccattgctaaaagcggtaaaagcgcaattgttgaagtgctgagccccggtcaacgcccgactaaacgcggattaatttacgccgcgacgccagccagcgattttgtctgtggcacgcaacaggtggctagcggtatcacagtgcaagtgtttacgaccggtcgtggtacgccgtacggcctgatggcggtacccgtcattaaaatggcaacccgcaccgagctggcgaaccgctggtttgatttaatggatattaatgcgggcaccatcgctaccggcgaagaaactattgaagaggtgggctggaagttgttccactttattctcgacgtcgccagcgggaagaagaaaaccttcagcgatcaatgggggctgcataaccagctggcggtgtttaacccggcaccggtgacctgatttcttttggaacgtccctcgcaaaacatggccttagtgccatgtttttattgtttaaagcccccacgtccattaataatgcatttgcattaccttagttcaagcttataatttgagcagaaaacaggctgtaaaaggacagtgaatcatgcccgctaatgctcgctctcacgctgtactgaccactgaaagtaaggtcacgatacgcggacaaacaactatccccgcgccagtgcgtgaggccttaaaactgaagccaggccaggacagcattcattacgaaattctgcctggtgggcaagtatttatgtgccgactgggagatgaacaggaggatcatactatgaatgcatttttgcgttttctggatgcagatatccagaacaacccgcaaaaaactcgtccattcaacattcaacaaggaaagaaacttgtcgctggcatggacgtcaacattgatgatgagattggcgacgacgaataatggattttccacaaagggttaatggttgggcgctatatgctcatccctgttttcaggaaacctacgacgctttagttgccgaagtcgagacattaaagggaaaagatcctgaaaattatcagagaaaagccgccacaaagttattggcggtagtccataaagtgattgaggagcatatcacggtcaatccaagtagtccggcattccgtcatggcaagagcttaggctctgggaaaaataaagactggagtcgggtaaaatttggtgctggtcgttatcgtctcttctttcgttatagtgaaaaagagaaagtcatcattctgggatggatgaacgatgaaaacactctgcgcacctacggtaaaaaaacagatgcctataccgtattcagcaaaatgttaaaaagaggacatcctcctgccgactgggaaaccctcacccgagaaacagaagaaacccattgatggtgttcacaatgcccgccgaacgcattcgtgttgaccagcgggcatcctttctcactccccgaccagaatcacttcaaccccagcctttcgcagtccttccaggctatccgcaggaatgccttcatcaacaatgatcatgtcgatacgttgagtatcaatgatcttatgtaaactggaacgattgaacttactggaatcggtgaccacgatgatccgttccgcaacttcgcacatccgacggtttaaacgagcttcatcttcattatgtgtgctgacgccgcgctccagatcgatcgcatctacaccaagaaacagcatatcgaagtggtaattttgcaggctttgctcagcctgatcgccgtaaaaagattggctctgacggcgcaaatgcccgccggtcatcagcagctcaacgccttccgcttccagcaacgcattagccacgttcataccgttggtcatcgcaattacgtcagtgtgcttgcgcatcagacgagcaatctcaaaagtggtggtcccggaatcgaggataacccgatgacctggctgaatcaactcaacggcagctttcgcaacgctgcgtttcatcgcggtgttcagtgcgcttttatcttccacacttggctcgacactcggcgtcgtgctatcgcagatcaacgcgccaccataggcacgcacagcgatcccctgcttttccagaaacgccagatcgttgcggatcgtcacagtagatacgccatacaatgcgctcagatcgttaacctgcacactcccttgctgtcgcagacgctgaatgatctgttctcgtcgctcgctggtgccagtcactcgcttctcaccactagcgtcggtattactcatagtaagtcctttcgtaaaactttcgtttcatttcgttttgcctattaacgcctttctattaagcaaatgcaagcccaccttgcccattgacgcaagctactctcgtttcagtgactttcattatgtttcttttgtgaatcagatcagaaaaccattatctttcgttttatttttatctcaccatgacgcagtatcaactgaaacaaaacgaaagattaatatcgcagtaatctgaactggagaggaaagtgaaacatctgacagaaatggtgagacagcacaaagcgggcaaaacaaatggaatttatgccgtttgttccgcacatccgctggtgctggaagctgcaatccgctacgccagtgcaaaccaaacgccgttactgattgaagcaacctccaatcaggtagaccagttcggcggttataccggaatgacgcccgccgattttcgcggctttgtttgtcagctcgccgacagcttgaatttcccgcaggatgcgttgattctgggtggtgaccatctggggccaaaccgctggcaaaacctgccggccgctcaggcaatggccaatgccgatgatttgattaaaagctacgttgcggcaggattcaaaaaaatccaccttgattgcagcatgtcctgtcaggacgatccgattcccttaactgatgacatcgtggctgaacgcgccgcccgtctggcgaaagtggcggaagaaacctgtcttgaacactttggcgaagccgatctggagtatgtcattggtaccgaagtgccggtacctggcggcgcgcatgaaaccttaagcgagctggcggtcaccacgccggatgccgcccgcgccacgctggaagcccatcgtcacgcctttgaaaagcaaggtttgaatgccatctggccacgcatcattgccctggtggttcaacccggcgtcgaattcgatcacaccaacgttattgattatcagcccgccaaagcgagcgccttaagccagatggtcgaaaactacgaaacgctgattttcgaagcgcactctaccgattatcaaacgccgcaaagcctgcgccagctggtgattgaccactttgccattctgaaagttggcccagcgctgaccttcgccctgcgtgaagctctgttctctctggcggcgattgaagaagaactggtgccagcgaaagcctgttctggtctgcgtcaggtgctggaagacgtgatgctcgaccgcccggaatactggcaaagccactaccacggtgacggcaacgcgcgtcgtctggcgcgtggttatagctacagcgatcgcgtgcgctattactggccggacagccagattgatgacgctttcgctcatctggtacgtaatctggcggatagtccaattccgctgccgctgatcagccagtatctgccgctgcagtacgtgaaagttcgctccggcgagctgcagccaacgccacgggaactcattatcaaccatattcaggacatcctggcgcagtaccacacagcctgtgaaggccaataagcaaaacaaagaggaacacgctatgccaaatattgttttaagccggattgatgaacgcttgattcacggtcaggtcggcgttcaatgggtcggatttgcgggggcaaatctggtgctggtagccaacgatgaggttgccgaagatccggtacaacaaaacctgatggaaatggtactggcagaagggatcgccgtacgtttctggacgctgcaaaaagttatcgacaacattcatcgcgccgccgatcgacagaaaatcctgctggtttgtaaaacacccgccgatttcctgacgctggtgaaaggtggcgttccggtgaatcgcattaacgttggcaatatgcactacgccaatggcaaacaacaaatcgccaaaacggtttctgtggatgcgggcgatatcgcagcatttaacgacctgaaaaccgctggggtggaatgcttcgttcagggcgtcccgacagagcctgctgtggacctctttaaattactttgagggattcatcatggaaatcagcctgttgcaggcatttgcgttgggcattatcgcctttatcgctggcctggatatgtttaacggcctaacccatatgcaccgcccggtggtcctcggcccgttggtcgggctggtacttggcgatctgcataccggaattttaaccggcggtacgctggaactggtgtggatggggctggccccgctggcgggcgcacagccgcctaacgtgattatcggtactatcgtcggcacggcgtttgccattactactggcgtgaaacccgatgtcgcagtaggtgtcgccgtacctttcgctgtcgcagtacagatggggattaccttcctgttcagcgtgatgtccggcgtgatgtctcgctgcgacctggcaacaaacccgcgccgcatttgatgctggtgccgacggcctggtgcattgctataacgggatgacaggtttacatcaccgcgaaccgggaatggttggcgcgggattaacggacaagcgcgcctggctggaactgatagccgatggtcatcatgtgcatccggcggcaatgagcctgtgttgttgctgtgcgaaagagagaatcgtactgatcaccgacgcgatgcaggcagctgggatgccggatggtcgctatacgttatgtggtgaagaagtgcagatgcacggtggcgttgtccgtaccgcgtctggtgggctggcgggcagtacgctgtctgttgatgcggcagtgcgcaatatggtcgagttgacgggcgtaacgcctgcggaagccatccatatggcgagcctgcatccggcgcgaatgctgggtgttgatggtgttctgggaagccttaaaccgggcaaacgcgccagcgtcgttgcgctggatagcgggctacatgtgcaacaaatctggattcagggtcaattagctagcttttgatagtttgctcctttattgggccttcacttcccccgtaaggcctttctttttctttcgttttgatctgtgcagcggtgtcggatgcgacgctaacgcgtcttatccgacctacagttggtgaccgcaaggccggataaagcgtttgcgccgcatccagcaatcccttttgcttcctttatcttttctttcaacgatcacaaatttcgttttatttcttttttctccattgaactttcagtttcttttctatagattttaatcaacgaaagacatcaccaagtgaaatgaaacgaaaggcaagtgaaagcgacaacgcccgacgtcaagttcatcagactaaggattgagttatgccagaaaattacacccctgctgccgccgcaaccggtacatggactgaagaagagatccgccatcagcctcgcgcatggatccgtagtctcaccaacatcgacgcgctacgttccgcgctcaataacttccttgaaccgttactgcgcaaagagaatctgcggatcatcctgaccggagccggaacgagcgcatttatcggtgacatcatcgcgccgtggctcgccagccataccggtaaaaacttcagcgccgtaccgaccaccgatctggtcaccaatccgatggactacctgaacccagctcatccgctgctgttgatctccttcggtcgatccggcaacagcccggaaagcgtcgcagccgtggaactggcaaatcaatttgtaccggaatgctatcacctgccgatcacctgcaacgaagcgggcgctctttaccaaaacgcgatcaacagcgataacgcgtttgccctgctgatgcccgcagaaacgcacgatcgcggctttgcgatgaccagcagcattaccaccatgatggccagctgcctcgcggttttcgcacctgagacgatcaacagccaaaccttccgcgacgtggcggatcgttgccaggcgatcctgaccagtctgggcgatttcagcgaaggtgtgtttggttacgcaccgtggaaacggatcgtttatctcggtagcggtggcttacagggcgcagcacgcgagagcgcgctgaaagtgctggaactgacggcgggtaaactggcggccttttatgattctccaaccggattccgtcatggaccaaaaagcctggtcgatgacgaaacgctggtggtggtatttgtctccagccacccttacacccgtcagtatgatcttgatctgctggctgaacttcgccgtgacaaccaggcaatgcgtgtaatcgccatcgccgcggaaagcagcgacatcgtcgctgccggtccacatatcatcctgccaccgagtcgtcactttatcgacgttgagcaggcattttgcttcctgatgtacgcccagacgtttgcactgatgcagagcctgcacatgggcaatacgccggataccccaagtgccagtggcaccgttaaccgcgtggtgcaaggcgtaatcattcatccgtggcaggcataagaggatcgcattatgagcattatctccactaaatatctgttacaggacgcccaggccaatggctacgcggtgcctgcttttaacattcataacgccgagacgatccaagcgatcctcgaagtgtgcagtgaaatgcgaagcccggtgatcctcgccggaacgccggggacctttaaacacatcgcgctggaagagatctacgccctgtgtagcgcctattccacaacctacaacatgccactggcgctgcatctcgaccaccacgaaagcctggatgatattcgccgtaaagtccacgcaggtgtgcgcagtgcgatgatcgacggcagccacttcccgtttgccgagaacgtgaagctggtgaaaagcgttgttgacttctgccacagtcaagattgcagcgtggaagcagaactgggccgcctgggcggtgttgaagatgacatgagcgttgacgccgaaagtgcattcctgaccgatccacaagaagctaaacgctttgtcgaactgactggcgtcgacagcctggcggtagcgattggtacggcgcacggcttatacagcaaaacgccgaagattgatttccagcggctggcggaaattcgtgaagtggtggatgttcctctggtgctgcatggtgccagcgatgttccggatgaatttgtccgtcgcactattgaacttggcgtcacaaaagtgaacgttgccacagaattaaaaatagccttcgctggcgcggttaaagcctggtttgcggaaaatccgcagggtaacgatcctcgttattatatgcgcgtcggaatggatgcgatgaaagaagttgtcagaaataaaattaatgtctgtggtagtgcgaatcgaattagtgcataatcattagttttttatgatttatcccaatgtacttcccgattaatatcggggagtgccttaatggaaaaggagataactaaaccttaataaatacatcactacaatatcgcaacaataatatatttaaaaaaattatattattcaactttatggtgaggattacacaatgaccagtccaaatattctcttaacccgtattgataaccgtctggttcacggtcaggttggcgtgacctggacatccaccatcggtgcaaatctgctggtagtcgtggatgatgttgtcgctaacgatgatattcaacagaaattaatgggtattaccgcggaaacctacggctttggcattcgtttctttactatcgaaaaaaccattaacgtcatcggcaaagctgcaccacatcagaagatcttcctgatttgccgtacgccacaaacggtacgtaaattggtagaaggtggtattgacctgaaagatgtcaacgtcggcaatatgcatttcagcgaagggaaaaagcaaatcagcagtaaagtttatgtcgatgaccaggatctcacggacttacgttttattaaacaacgtggcgtgaatgttttcattcaggacgtccctggcgatcaaaaagaacaaatccctgactaaatctaaaatcgccttaatattggtttgaggtaataaaaatgcatgaaataaccctacttcagggattatccctggcggcgttagtttttgttctggggattgatttttggctggaagccttatttttattccgcccgataatcgtttgtaccctaactggcgctattctcggtgatattcagactggcttaattaccggtggtctgacagagttggctttcgccggattaacccctgcaggtggtgttcagccgcccaacccgattatggcgggtctgatgaccaccgtcattgcatggtctacgggcgttgatgccaaaacagcaattggtcttggcctgccgtttagtttgttaatgcagtacgtcattctgttcttctattccgctttcagtttatttatgaccaaagccgataaatgcgcgaaagaggcggatacggcagcgttttcccggcttaactggacaacgatgctcatcgtcgctagtgcgtatgcggtgattgctttcctctgtacttacctggcacagggggcgatgcaggcgctggtgaaagcgatgcccgcctggctgacccacggctttgaagtggctggcggtattctgcctgccgttggttttggcttgctgctgcgcgtaatgttcaaagcgcaatatatcccttacctgatcgccggtttcctgtttgtttgctacatccaggtcagcaacctgttgccggttgccgtactgggcgcaggctttgcggtgtatgagtttttcaatgcgaaatcccggcagcaagcgcaaccgcagcccgttgccagtaaaaatgaagaagaggactacagcaatgggatctgaaatcagtaaaaaagatatcacccgtctgggctttcgtagcagcctgctgcaagcgagctttaactacgaaaggatgcaggcgggcggttttacctgggcgatgttgccgatcctgaaaaagatttataaggacgacaaaccgggcttaagcgcggcgatgaaagataacctcgaatttattaatacccacccgaatctggtcggattcctgatggggttattaattagcatggaagaaaaaggagaaaaccgcgacaccattaaaggcctcaaagtggcactgtttggcccaatcgccgggattggcgatgcgattttctggtttactttgttgccgattatggcgggaatttgcagtagttttgccagccagggaaacctgctggggccgattctatttttcgccgtttacctgcttatctttttcctgcgcgtcggctggacccacgtcggttatagtgtcggcgtgaaggcgatcgataaagtgcgagagaacagccagatgattgcccgtagcgcaaccatcctcgggatcacggtaatcggcgggctgatcgctagctatgtgcatattaacgtggtgacaagctttgccatcgacaatacccacagcgttgcgctgcagcaggatttcttcgataaagtcttcccgaacattttaccgatggcctacaccctgctgatgtattacttcctgcgggtgaaaaaagcgcatccggtgctgttaatcggcgtgacttttgtgctctctattgtttgttccgcattcggcattttgtaaatggaacgaggcactgcgtctggtggtgcctctttacttaaggaatttcatcctgtgcaaacccttcagcaagttgaaaactatacggcgttaagtgaacgtgccagcgaatatttattggccgtgatccgtagcaaaccgaatgccgtgatttgcctggcgaccggagccacgccattactgacgtatcattatctggtagaaaaaatccaccagcagcaggttgatgtcagccagctcaccttcgtgaagctcgacgaatgggtggatctgccattaacgatgccaggcacctgcgaaactttcctgcaacagcatatcgtgcagccgctggggctacgtgaagaccagctcatcagctttcgctccgaagagataaatgagacagagtgcgaacgggtaacgaacctgattgcgcgcaaaggcggtctggatttatgcgttctcggattggggaaaaacggtcatcttgggctgaacgaaccgggagaaagcctgcaaccggcctgccatatcagtcaacttgatgccagaacacagcaacatgagatgttaaaaaccgcgggtcgccccgtgactcgtgggatcaccttaggcctgaaggatattctcaatgcccgcgaagttttgttactggtgactggcgaaggaaagcaggatgcgacagatcgttttctcacggctaaagtctctaccgctatcccggctagttttttatggctgcacagtaactttatttgtttaattaacacctaaccagatgaaaaatttgctcaaaatgtttaaattaacttatgtaacagtcacgcattatattaaataacatttgactgggttgaacataacgccgatagcaaaaggagttatgttcaacaatttaattttagatatacatataacttgttctattaataaatcacctcgtattctgactcgccccctggcgcagcaaagtcaggcatttatactcttttgaatacatagaaaattgatatcaatataatgaaaatatcaaatatttgcatataaatataatcttaaagttcagtctatttaatgttcaatgaaatatttctgcctgtataatctttaaagatgttgaacatatattcacattaaatatgattatgtacttgttacaaggataaggttatatatgaataaagttacaaaaacagctattgcgggcttacttgcgcttttcgcaggtaatgccgctgcaaccgatggtgaaatagtttttgatggcgagattttaaaatccgcttgtgaaatcaatgactctgataagaaaattgaagttgctcttggtcactataatgccgaacagtttcgtaatattggcgagcgtagcccaaaaattccattcactattcctttagttaactgcccaatgactgggtgggagcacgataacggcaacgttgaagcgtctttccgtctatggctggaaacgcgagataatggcaccgtccctaacttccctaatctggcaaaagtaggctcttttgctggcatagcggcaacaggtgtgggtatccgtattgacgatgcggaaagcggaaacattatgccactgaatgctatgggcaatgataacacggtttatcagatcccggcggaatccaatggtattgtcaatgttgacctcatcgcttactacgtaagtaccgtagttccaagtgaaatcaccccaggggaagcagacgctatcgttaacgtaacgctggattaccgttaatacgttagggcgttatctgacctgtcagataacgcccttttccttcctctttctcgttgtatcaggttgaaaaataactatgagtaaacgaacattcgcggtgatattaaccttgttgtgtagcttctgtattggccaggcgcttgcaggaggaatcgttttacagcgaacgcgagtgatctatgatgccagccgcaaagaggctgcgttacctgtcgcaaacaaaggcgcagaaacgccttatttactgcaaagttgggtagataatatagatggtaaaagccgtgccccatttattataaccccaccgctatttcgtcttgaggctggcgatgacagtagtctgcgaattattaaaacagctgataacctgcctgaaaataaagagagcctgttctacattaatgttcgtgccattccagcaaagaaaaaaagtgatgatgttaatgctaacgagttgacgctggtatttaaaacacggatcaaaatgttttatcgccccgcacacctgaagggacgggtaaacgatgcgtggaaaagtctggaatttaaacgtagtgaccatagtctcaatatatataacccaactgaatattacgtcgtatttgccggactggcagtcgataaaaccgatctcacaagcaaaattgaatatatcgcgcccggagaacataaacagttaccacttcctgcatctggcggaaagaacgtgaaatgggctgcgatcaatgattatggcggcagttccgggacagaaactcgtccactgcaataaaaaatataaaaacacaggtcatcagggaatgccacaacgacaccaccagggacataaacgcacaccgaaacagttggcgctcatcatcaaacgttgtttgccgatggtgctcactggcagcggcatgctttgcactaccgctaacgccgaagagtattatttcgaccccattatgctggaaaccacaaaaagtggtatgcaaacaaccgatctgagccgttttagtaaaaaatatgcacaactaccaggaacttatcaggttgatatctggctgaataaaaagaaggttagtcagaaaaaaattacatttaccgccaatgcagagcaacttctgcagccacagtttacggtagaacaactacgtgagctgggtattaaggtggatgaaatcccggcgctggctgaaaaagatgacgatagcgtgatcaacagccttgaacaaatcattcccggtacagctgctgaatttgatttcaatcatcagcaacttaatttgagcattccccaaattgcactgtaccgtgatgcaagaggttacgtctccccttctcgttgggacgatggtataccaacgctgtttaccaactacagctttacaggttctgataaccgttaccgccagggcaatcgtagccaacgacagtacctgaatatgcaaaatggtgctaattttggcccctggcgattacgcaactattccacatggacacgcaacgatcagacaagtagctggaataccatcagtagttatttacaacgtgatatcaaggcgttgaagtctcagttgcttctgggagaaagcgccaccagcggcagtattttttccagctacacctttactggcgtgcaactcgcttccgacgataatatgttgccaaacagccagcgcggatttgccccaacggtacgcggtatcgcaaacagtagtgcaatcgtgactatcaggcaaaatggttatgtgatctatcaaagcaacgtgagtgcgggtgcctttgaaattaacgatctctacccctcttccaacagcggcgatttagaagtcacgattgaagaaagtgacggtacacaacgtcgctttatccagccttattctagtttacccatgatgcagcgacctgggcatctaaagtatagcgcgaccgctggacgctatcgcgctgatgcaaacagtgatagcaaggaacccgaatttgctgaagccacggcaatatatggtttgaataatacttttacgctgtatggcggcctgctcggttctgaagattattatgcgctggggatcggtatcggcggcacacttggcgcactgggcgcgttgagcatggatatcaacagagctgacacccaattcgataaccagcactcttttcatggctatcaatggcgtacgcagtacatcaaagatatcccggaaaccaacaccaatatcgctgtcagctactatcgctataccaacgatggctattttagttttaatgaagccaatacccgcaattgggactataacagtcgccaaaaaagtgaaattcaattcaacatcagccagacaatatttgatggggtaagtctgtatgcctccggtagccagcaagactattggggcaataacgataaaaacaggaatatctctgttggggtttccggccagcaatggggagttggttacagcctgaattatcaatacagccgctacactgatcaaaataatgaccgcgcactctctttgaatctcagtattccgttagaacgctggttaccgcgtagccgggtttcctatcagatgaccagccagaaagatcgcccaacccaacatgaaatgcgtcttgatggcagtctgctggatgatggtcgcctgagctatagcctggaacaaagtctggatgacgataacaaccataacagtagcctgaacgccagttaccgtagtccttatggcaccttcagtgccggatacagctacggtaatgacagcagccaatacaattacggcgttaccggcggcgtggttatccatcctcatggcgtgacgctcagccaatatctgggcaacgcttttgcgcttatcgatgctaacggagcatctggcgtgaggatacaaaactatccggggattgctaccgatccttttggctatgcagtggttccttatctcacaacttatcaggaaaaccgtctcagcgtagatactacgcagctgcccgataacgtcgatcttgaacaaacaacacagtttgtggtgcccaacagaggtgcaatggtagcggcgcgtttcaacgccaatatcggttatcgcgtacttgttacagtcagcgatcgcaacggtaaaccgttgccctttggcgctcttgccagcaacgatgatacggggcaacaaagtatcgtcgatgagggcggcatactatatctctctgggataagcagtaaaagtcaaagctggactgtacgctggggaaatcaggcagatcaacaatgtcagtttgctttcagtacaccggatagtgaacctacaacctctgtattacaaggcacagcgcagtgccattaaggataaaaaaatgaaaagagcgcctcttataacaggtcttttgttgatatccacatcctgcgcttatgcctccagtggagggtgtggagccgacagcactagcggtgcgacaaattacagcagtgtggttgatgatgttacggtgaaccagacagataacgtgacaggacgggagtttacctctgcaacgctaagtagcactaactggcaatacgcctgttcctgctctgcgggtaaggcagttaaacttgtctatatggtcagccccgtacttaccaccactggacatcagacaggatattacaaactcaatgacagcctggatattaaaaccacattacaggcaaacgacattccaggactcacaaccgaccaggttgtctctgttaacacccgattcacacagataaaaaacaacacggtatattctgctgcaacccaaacgggtgtttgccagggtgatacgtctcgttatggacccgttaatattggtgcgaacaccacctttaccctgtatgtcaccaagccatttctcggcagcatgaccattccgaaaacggatattgccgtcattaaaggcgcgtgggtcgatggaatgggaagcccgtctacaggtgacttccatgatttagtcaagttaagcattcagggaaatctcaccgccccacagagctgcaaaattaatcagggcgatgttattaaggttaattttggattcatcaatggtcagaagtttaccacccgcaatgccatgccagacggttttactccagtagactttgatatcacttatgactgtggtgatactagtaagattaaaaacagcttgcaaatgcgcatcgacggtacaactggggtagtagaccagtacaacctggtcgccaggcgaagaagtagtgacaatgtgcccgatgtcggtattcgtattgaaaatctcggcggcggagttgcaaatattccttttcagaacggtatccttcccgttgatccttccgggcatggcaccgtcaatatgcgcgcctggccagttaatctggtcggtggtgagctggaaacaggaaaatttcagggcacagccaccattaccgtcatcgtgcggtaaaagaagacgttgcgttttgattaacgcaacgcttcggcactgttacccctgctgctccagcgcatacttatacagcgcatttttcttcacgccgtgaatttctgcggccagcgccgccgcttttttcagcggcagttctgcctgtagcagcgccagcgtgcgcagggcatcggcgggtaagtcttcttcctgtgctttatgaccttcgacaatcagcaccatttcgcctttgcgacggttttcatcttcctttacccacgccagcagctcgccaacgggcgcgccgtgaatggtttcccaggttttggtcagctcacgcgccagaaccacgtagcgggattcgcctaataccgcaacgatatcttccaggctatctaacagacggtgggtagattcataaaaaatcagcgtgcgcggctccgcttcaatggcttttagcgcatcacggcggcctttacttttggcaggtaaaaagccttcgtaacagaaacggtcagagggtaaacccgctgcgcttaacgcagtgatagcagcacacggcccgggtagcggcaccacgcggatccccgcttcacggcaggtacgcaccagatggtagccaggatcgttaattagcggcgttccggcatcggaaaccagcgcaatgttttgcccctcttgcagcttcgccagcagcgtttcagctttttgttgttcgttatggtcgtgcagcgcaaacaaccgggcattaatcccaaaatgttgcagcaataaaccggtgtgacgagtatcctcggcggcaatcagatcaacggcctgtaatacctctaacgcacgctgggtgatatccgccagattgccgattggcgtcggtacaatgtaaagctggccctgagaattatccgcgctttggtgttgtttcattgtgtcgtccgtattgccgatttaatattgagcattgcgtaaaaaaaatatcactggatacattatggtacccagtacattttctcgtttgaaagccgcgcgttgtctgcctgttgttctggcagccctgattttcgccggttgtggcacccatactcccgatcagtccactgcttatatgcagggcacggcgcaggctgattctgccttttatcttcagcagatgcagcaaagctctgatgataccaggatcaactggcaattactcgccattcgtgcactggtgaaagaaggtaaaaccgggcaggcggttgagttgtttaaccaactaccgcaagaactgaacgatgctcagcgtcgcgagaaaacactgctggcggtagagattaaactggcgcagaaagattttgctggcgcgcaaaacttgctggcgaaaatcacacctgccgatttagaacaaaaccagcaagcgcgttactggcaggcaaaaatcgatgccagccaggggcgtccttccattgatttactgcgcgcgttaattgctcaggaaccgctgcttggcgcgaaagaaaaacagcagaatattgatgccacctggcaggcgctctcctccatgactcaggaacaggcgaatacgctggtgatcaacgccgacgaaaatattctgcaaggctggctggatctgcagcgcgtctggtttgataaccgtaacgatcccgacatgatgaaagccgggatcgccgactggcagaaacgttatccgaacaatccgggcgcgaaaatgctgccaacgcagttggttaacgtaaaagcgtttaaaccagccagcaccaacaaaatcgccctgctgttgccactgaatggccaggcagcggtatttggtcgcactattcagcaaggctttgaagcggcgaaaaatatcggcactcagccagtggcagctcaggtagctgccgcacctgccgcagacgtagctgaacaacctcagccgcaaaccgtggatggcgttgccagcccggcacaagccagcgttagcgatctgaccggtgaacagcctgcagcccagccggtgcctgtaagcgccccggcgacaagcaccgcagcggtaagcgcacccgcaaatccatccgcagagctgaaaatctacgataccagtagtcaaccacttagccagatcttaagccaggttcagcaggatggcgcgagtattgtggtcggtccgttgctgaaaaataacgttgaagagttgctgaagagcaacactccgctgaacgtactggcactgaaccagccggagaatatcgaaaatcgcgtcaatatttgttacttcgcgcttagtccggaagacgaagcgcgcgatgcagcgcgtcatattcgtgaccagggtaaacaagcgccgctggtgctgatcccacgcagtagtttgggcgatcgcgtagccaatgcgtttgcgcaagagtggcagaaactgggcggcggcaccgttctgcaacaaaaatttggttccaccagcgaattacgcgcgggtgttaacggcggttctggtattgctttaacgggtagcccgattactctcagagcgacaaccgactccggcatgacgaccaacaatccaacgctgcaaaccacgccaaccgatgaccagttcaccaataatggcggtcgtgtcgatgcggtgtacattgtggcaacgccgggtgaaatcgcttttatcaaaccgatgatcgccatgcgtaacggtagccagagcggtgcaacgctgtacgccagctcccgcagtgcgcaagggaccgctggcccggatttccgactggagatggaaggcttgcagtacagcgaaatcccgatgctggcaggcggtaatctaccgttaatgcagcaggcactcagcgcggtgaataacgattatagtctggctcgcatgtatgcgatgggcgtcgatgcctggagcctggcaaatcatttcagtcaaatgcgccaggttcagggttttgaaatcaacggtaataccggaagcctgacggctaacccggattgcgtgattaacaggaacttaagttggctacagtaccaacaaggtcaggtagtccccgtcagttaaattaagtgattaacaggaacttatcatggctacagtaccaacaaggagtggtagtccccgtcagttaaccaccaaacagaccggcgatgcgtgggaagcacaagcgcgtcgctggctggaaggcaaaggactgcggtttatcgccgctaacgtgaacgagcgtggcggcgagatcgatctgataatgcgtgaaggccggaccaccatttttgtcgaggtacgctatcgccgctctgcgctttatggcggcgcggcagccagtgtgacccgcagcaaacaacacaaattattacagactgcccgcttgtggctcgcgcgtcataatgggagttttgatactgtggattgccggttcgatgtggtagccttcaccgggaatgaggttgagtggattaaggatgcctttaatgaccacagttaattaaggtttaaggattagcgtgcaagaaagaattaaagcttgcttcactgaaagcattcaaactcaaattgcggcggcagaggcgcttccggatgccatctcccgtgcagccatgacgctggttcagtctctgctcaatggcaacaaaatcctctgttgtggtaatggaacttccgctgccaatgcacagcattttgctgccagcatgatcaaccgtttcgaaacggagcggcccagcttacctgccattgcactaaatactgataatgttgtcttaacggcgattgccaacgatcgcttacatgatgaagtgtatgcaaaacaggtgcgggcgctgggtcatgcgggagatgtattgttagccatttccacccgtggcaacagccgcgatattgttaaagcagttgaagccgccgttacgcgtgatatgaccattgtggcattgaccggctatgacggcggcgaacttgcaggtttgttagggccacaggatgtggagatccgcattcctagccatcgtagtgctcgcattcaggaaatgcatatgctgacggtaaattgcctgtgcgatctgatcgataacacgcttttccctcaccaggatgattaaggagaatacatgaaggcattaagcccaatcgcagtccttatttccgcgctgctgttgcaaggttgtgttgccgctgccgtagtgggtaccgctgctgtgggtaccaaagccgcaactgacccacgcagtgtcggcacccaggtggacgatggtaccctggaagtgcgcgtgaacagcgcattgagcaaagacgaacagattaagaaagaagcgcgcattaatgtaacggcctatcagggcaaagtgctgctggttgggcagagtccaaatgctgaacttagcgctcgcgccaaacagattgctatgggcgtagacggtgccaacgaagtgtataacgagattcgtcagggccagccgattggtctgggcgaagcatctaacgatacgtggatcaccaccaaagtgcgtagccagctcttaaccagcgacctggtgaaaagctccaacgtgaaagtgaccaccgaaaacggtgaagtgttcctgatggggctggtgactgaacgtgaagcgaaagcggcggcagatattgccagccgggtgagcggcgtgaagcgggtaactacggcgtttacgtttattaaataacagccccttgtaatgcctgatgcgacgcttgccgcgtcttatcaggcctacaacgatacaaaccgtaggtcagataaggcgtttacgccgcatccgacatgttttccctcaaatcagaacaacagcgccagcccgccgacaatcacaccagacactgccaccatcgcccctgtcagccataaggctttcgccgggaacgctttgcgcagcataatcagactcggcaaactcactgccgggagcgtcatcaacaatgccagcgccggagcggttcccatacctgccagcatcatcgtttgtacaatcggaatttctgctgccgtgggaatgacaaacaagcatcctgctaccgccatcgccaccacccacatcaggctgttatcgacagcaccatcggcatgggggaataaccagacgcgagcggcacccaacaccagtactgcaaggatgtaaaccgggatcgtactccagaaaagcgtccatagcgccctgccccagcggctaaaaaacccgccctgtgcttccggtatgtcaatttcgaccggtgcctgcgtttgcggtgtttcacgcacccatttttgcaccagcgtcgcaatcagcaacaccatcaccagcccggccaccagacgaatcgccgcaaaaccccagccgaggacaaagcccataaacaccagcgtcgccgggtttaacaccggattgcccatccagaatgccagcgcaccgcccatgctcacctgttggcgacgcattcccgccgcgaccggagccgcacagcaggtacacatcatgcccggcaagctaaacagcgttcccagcagcgtgccgcgaaagcggctttgcccaagcgtacgcaacaaccagtcacgcgggatcagcacctgaatcaagctaccgaggatcacccccagcaccgccgctttccataccgcgaggaaatagatcatcgcgtaatccaacgccgcctgccatgggttagcatccgcctgcgcaaggatagatttaccgatactgtgggtttcggcagcagtaaacgctttgccgtagtaaggttcccatttcacataccagagaccggcaatgacaacgagaaagaaaagcgcgggtttccaccactgaatgggcgttgccgcctgagaactagactgaccagtcatagcattccccaggaataagttatgataattgagcgcgtgaatattacgctcactatcaattcttgggaataattattcagctcttttgcgtaattcactagagcttaaaatcgtcacgccttcatgctcaggccgcatgctctctgccagcatgacccgcgccacgtctctcgcatcaatggatttccagttacctggtaacaaacggaacagcggcgcaaaaagcgtttcgttcatccgctgtttgctacgatcgcccagtaacatgctcgggcgagcaatggtcaatttcggccagttctgggcgattaatgcttcttccatctcccctttgacgcggttatagaaaaacgggctgtgggcattggcacccatcgcactgactaccaacatatgctgcgcgcccagtcgccgcccggttaatgcggtatccactaccagcgtgtaatcggcatgaataaacgcctctttgctccccgcttctcgccgcgtggtgccgagacaacaaaacacaatgtcgatgggatcggtgacctgcgccaacgcgtcactcagttgcggatcatggggattaaacaccccgggcatatcgcccaacggacgtcgcgtcggcgcagcaatggcgttaactttcggttcgttaatcaacatccgcagcaggtgaccgcccaccagccccgttgcgcctgtaatcagtacctgactcatcttcgctcctttacagaattgtctgccttgcgctccacggctcatgcaccaggcttaatagaccatgaggtaattatccccgattgtgggaaattcgcctcatccaatgcaacaacgcggaggaagcatgagtaagaaaattgccgttttaatcactgatgaatttgaggatagtgaatttactagtcccgcagacgagttccgtaaagccggacacgaagtgattaccattgaaaaacaagcgggtaaaacggtgaaaggcaaaaaaggagaagccagcgtgaccatcgataaatccatcgatgaagtgacgcctgcggagtttgatgccctgctgctaccgggcggccatagtccggattatctgcgtggggacaaccgttttgtcacctttacccgtgattttgtgaatagtggcaaaccggtgtttgccatctgtcacggcccgcagttgctgatcagcgccgatgtgattcgggggcgcaaactgaccgcagttaaaccgatcattattgatgttaaaaatgcgggcgcggaattttacgatcaggaagtcgtggttgataaagatcagctggttaccagccggacaccggacgatctgccagcgtttaaccgcgaggcgttacgcctgctcggtgcctgattacgcctgctcggtgccactgtcgcgtagccaaatcatttttttaccaaagcccagcgtgttgtcggtgaatttgatttcatcgagccggatttcccacaccggggcgctcagcattctggcaaccggaaagcgacgattgtacgccttgcgcgcgaggtcgctttcctcaccttccagcctgcggatctcacctttaaactgcacaccgcgaattaacgctaccgttttcggctgaccgtttaccgttccggcaaccgcagcctgcggcccactcatctgcgcgtggcgcgttttttcttccgtcaaaatgtagaaggcgactttctgcgcatcaaaaagataaaaggcattagcgcaccagagttccccttcctgctgcacacaccaagtgacaacatgttgttttgccagccaacggctgatggcgatgagtgtttccattgctgttctcttttatactgtgggcctgaccttaacatgcgacgcagacgatgacaccctggtttctttacttgatccgtaccgccgacaataagctttataccgggatcaccacggatgtcgaacgccgctatcagcagcaccaaagcggcaaaggggcgaaagcactgcgcgggaaaggagaactaacgctggtgttttccgcgccagtgggcgatcgtagcctggcgttacgggcggaatatcgcgttaagcaactgaccaaacggcaaaaagagcgtctggtagcggaaggcgcagggtttgcagagctgttaagcagtctgcaaaccccggagattaaaagcgattgaaatgctcgtgatactcaaccaggccggtaacgccattcagcgcgtcatccgctaaacgatgtacctggaaggcgctttcagtgcccggccagcggcaacgcagatcgtgatgcgccgccagttcaaagccgaaacgactgtacagcgccggatcgcccagcgtcaccactgcggcatagccgaactcattaaggctatcgagtccttcatagaccagttggcgtgccagcccctgtccacggtatttttcatcaaccgccaacggtgccatgccgacccattgcaggtcttcgccctgcacatcaaccggactaaatgccacatagccaatgacctgaccttcgtcatctgtcgccaccagccccagcgtcagaaagccatcttcacgcagatcgtgaaccagcttcgcttccgcatcactttcgaaactgcgacgcagcagggcatcaatacccggcgcatcaatgggaatttctactcgaattagcatggttcacctacgcttgtctgtttggtttcaggcgcggttttcattcccgcctcaacaaaatccgccagttgcagcagcatcatgcgtaaggctttcggcatttgctccagttcaatggcgtccatcaggtttttcacatacagccccagctccgtatcgccttcaatcaccagccgacgctggaagaagagcgtatccggatcttgtttacgcgccgcaatcatcagcagatcgctggcgtcggcactaaaactcacatcagcttgcgcgttctggctaacgaccagtttgccattcaccacgctggtaaaccattgcaggtcaatatcacgcacatgaatacttaaccagcggccttcaagaaactccagctcgccatcatccagcgcctggcggaattgccagcttaagacctgctcaagaacctggcgttttagcgcaaatggcgtcagttttaccggtacactcaacagagatggccccaaatgcacaatacgggaacgcagtttatccaacacgagttttactccctgtttcaacaatcatcctattttgccatatcagaaaaataacatagcggtataaatcaacaattccatatgaaattgctgctaccaccaatacaactttaactgccttaaatcaaaaattgtcgcagcaaggttaactaaaatcccagttcgttaacatttttgcgttttgatagcgcaaccttcaggaaaaattatggagctgctctgccctgccggaaatctcccggcgcttaaggcggccatcgaaaacggcgcagatgctgtttatatcgggctaaaagatgataccaatgcccgtcacttcgccggccttaactttaccgagaaaaaattgcaggaagcggtgagttttgtccatcaacatcgccgcaaacttcacatcgcgattaacacttttgcgcatccggacggttacgcccgttggcagcgcgccgtggatatggcggcgcagctgggtgccgacgcgctgatcctcgccgacctcgccatgctggagtacgccgccgagcgttatccgcatattgagcgccacgtaagcgtgcaggctagcgcgaccaatgaagaggcgattaacttttatcatcgccattttgacgttgctcgcgtggtgctgccgcgcgtgttgagcattcatcaggtgaaacaactggcacgggtcacacctgtaccactggaagtctttgctttcggcagcctgtgcattatgagcgaaggtcgttgctatctgagcagctatctgacgggtgagagccccaacaccataggcgcgtgttctccggcccgtttcgtgcgctggcaacaaacgccgcaggggctggaatcccgcctgaacgaagtgctgatcgaccgttatcaggacggcgaaaacgcaggttatccgacgctatgtaaagggcgttatctggtggacggcgagcgctatcacgcgctggaagaaccaaccagtctcaataccctggaactgctgccggagttaatggcggcgaatattgctagcgtgaaaattgaaggccgccagcgtagcccggcgtatgtcagccaggtggcgaaagtctggcgtcaggctatcgaccgttgtaaggccgatccgcaaaactttgtaccgcaaagcgcgtggatggagacgctcgggagcatgtccgaaggcacgcaaaccactcttggcgcatatcaccgtaaatggcagtgagaaaagcaatgaaatattccttagggccagtgctgtggtactggccaaaagagacgctggaagaattttatcagcaggccgccaccagcagcgccgacgtgatttatcttggtgaagcggtatgcagcaagcgtcgggcaaccaaagttggcgactggctggagatggcaaaaagcctcgccgggagtggtaagcagattgtgctctccacgctggcgctggtgcaggcaagttctgaactgggcgaactgaaacgctatgttgagaacggtgagtttctgattgaagccagcgatctcggcgtggtgaatatgtgcgctgaacgcaaactgccgttcgtcgccgggcacgcgctgaactgctacaacgcggtgacactgaaaatattgctcaaacagggcatgatgcgctggtgtatgccagtggagctttcccgcgactggctggtgaatctgcttaatcagtgcgatgagctgggcattcgtaaccagtttgaagtggaagtcctgagctacggtcatctgccgctggcctactccgcccgctgctttaccgcgcgtagcgaagaccgcccgaaagatgagtgtgaaacctgctgcattaagtatccgaacgggcgcaacgtgctgagccaggaaaaccaacaagtgtttgtactcaatggcattcagaccatgagcggctacgtttacaacctcggtaacgagctggcatccatgcagggcctggttgatgtggtccgcctgagtccgcagggtactgacactttcgcgatgctcgacgccttccgcgctaatgaaaatggcgctgcaccactgccgttgacggcgaacagcgactgtaacggctactggcggcggctggcaggactggagctgcaagcctaagtaaatagctcactttgttaacaactttaactactctttaatgcagtattaaagattaatcggtaacaaagtgagctgttatgactgataaaaccattgcgtttagcctactcgatctggcccccattcccgaaggttctagtgcgcgagaagcattctcccactctctcgatctcgcccgtctggctgaaaagcgcggctatcatcgctactggctggcagaacaccacaatatgactggcattgccagtgctgccacgagcgtattgatcggctatctggcggcgaataccaccacgctgcatctggggtctggcggcgtgatgttgcctaaccacagtccgttggtcattgcagaacagttcggcacgcttaatacactctatccggggcgaatcgatttggggctgggtcgtgctccgggtagtgaccaacggacaatgatggcgctacgtcgtcatatgagcggcgatattgataatttcccccgcgatgtggcggagctggtggactggtttgacgcccgcgatcccaatccgcatgtgcgcccggtaccaggctatggcgagaaaatccccgtgtggttgttaggctccagcctttacagcgcgcaactggcggcgcagcttggtctgccgtttgcgtttgccagtcacttcgcgccggatatgctgttccaggcgctgcatctttatcgcagcaacttcaaaccgagtgcacggctggaaaaaccatacgcgatggtgtgcatcaatattatcgccgccgacagcaaccgcgacgctgaatttctgtttaccagtatgcagcaagcctttgtgaagctgcgccgtggcgaaaccgggcaactgccgccgccgattcaaaatatggatcagttctggagtccgtctgagcagtatggcgtgcagcaggcgctgagtatgagcttggtaggtgataaagcgaaagtgcgtcatggcttgcagagcatcctgcgcgaaaccgacgccgatgagattatggtcaacgggcagattttcgaccaccaggcgcggctgcatagctttgagctggcgatggatgttaaggaagagttgttgggataatgtgtcttaacgcgggaagccttatccgagctggcaacgctgtcctacatagacctgataagcgaagcgcatcaggcattgtgtaggcagcagaaatgtcggataaggcaccgctgattactgatacaccggcagtaaattaaagctgcttaaaatatgcaccagtgcgttgccgacgccaaacaccagaatcagcgcaatcatcggcttgccaccccagacgcggaatttcgggctgccaaagcgtttacggcttgcacgggctaacagcgccggaacaattgccgcccagatggtagccgctaaaccagcataaccaatggcgtacaggaatccgttcgggaacaacagcccccccacaactggcggggcaaaggtcagcaatgccgttttcaagcggcccacagcgctgtcgtcgaaaccaaacagatctgccagatagtcaaacaaacccagcgttacgccgaggaagctactcgctaccgcaaagttactgaacacgaccagcagcagatccagactacggctgttcagtacgccgcttaacgcctgtaccagcacatcaatattaccgcccttctctgcaataccgataaactccggacgcgggatgttacccatcgtcgccagcaaccagatggtatacagcgccagcgccatcagcgtaccgtacaccagatatttcacgatggttttcggatctttgccgtaatacttcatcaggcttggcacgttaccgtgataaccaaagcttgccagacagaacggcagggtcatcaacagatacggtgcataagacgcattgctttcggcgacgttgaacaatgtcgcaggctgcacatgccccagcaggctaccaaaggtgaggaagaaggtaatgactttcgcccccagcacaatcgctgtcatgcgactgacggctttagtgctcaaccacaccacaaacgctaccagcaatgcaaaaccaaaacccgccgcccgtgccgggacgtttagactcatctctgcgaaggtgtgatgcagaatgctaccactggcagaaatataggcataggtcaggatatagagcacaaaggcaatggaaatgccgttgaccacgttccagcctttgcccagcaaatctttggtgatggtgtcaaaactgctaccgattctgtaattcaggttagcttccagaatcatcaagccggaatgcagcatacagaaccaggtaaagatcagcgccgccatactccagaaaaaccacgccccggacatgaccactggcagagaaaacatccctgcgccaataatggtgccgccgataatcaccacgccgccaagcaggctcggactcgtttgggtggtggttagtgttgccatgagggcttctctccagtgaaaaatagtgcgactgcgttgttatgcattgcactgtaccagtacacgagtacaaaagacagaaaaaaagccccgatggtaaaaatcggggctgtatatattattttacagattgtgttcgctgttcagcgatgattacgcatcaccaccgaaacgacgacgaccggtagaatcatcacgacgcggagcgcggccttcacgacgttcgccgctaaaacgacgaccatcaccacggccaccttcacggcgttcaccgctgaagttacgaccgccttcacgacgttcgccaccgaaaccacgaccaccgccacgacgctcaccgccagtatgcggctgtgcatcgcccagtaactgcatgttcatcggcttgttgagaatgcgagtgcgcgtaaagtgttgcagcacttcacccggcatacctttcggcagttcgatggtggagtgagaagcaaacagcttgatgttaccaatgtaacggctgctgatgtcgccttcgttagcaatcgcaccaacgatatgacgaacttcaacaccatcatcgcggcccacttcaatgcggtacagctgcatatcgccaacatcacgacgttcacgacgcggacgatcttcacggtcaccacgcgggccacggtcgttacgatcgcgcggaccacggtcatcacggtcacggaattcacgtttcggacgcatcggcgcatctggcggtacgatcagagtacgttcaccctgtgccattttcagcagtgccgcagccagagtttcgagatccagctcttcaccttcagcagtcggctgaattttgctcagcagtgcgcggtattgatccagatcgctgctttccagctgctgctgtactttagcggcgaatttttccagacggcgtttgcctagcagttctgcgttcggcagttctacttccggaatagtcagcttcatagtacgttcaatgttgcgcagcagacgacgctcgcggttctcaacgaacagcagcgcgcggccagcacgacccgcacgaccggtacgaccgatacggtgaacgtaagactcagaatccatcgggatatcgtagttaactaccaggctgatacgctcaacgtccaggccacgggctgcaacgtcggtcgcaatcaggatgtccagacgaccatctttcaggcgttccagtgtctgttcacgcagcgcctggttcatgtcaccgttcagcgcggcgctgttgtagccgttacgctcaagagcttcagccacttccagagtcgcgtttttggtacgaacgaagataatcgccgcatcaaaatcttccgcttccaggaaacgtaccagtgcttcgtttttgcgcataccccagacagtccagtagctctggctgatgtcaggacgggtagtcacgctggactgaatgcgcacttcctgcggctctttcataaagcggcgggtaatgcgacgaatcgcttccggcatggttgcagagaacagagcggtctgatgaccttccgggatctgcgccataatggtttcaacgtcttcgatgaagcccatgcgcagcatttcgtcagcttcatccagaaccagaccgctcagtttagagaggtccagagtgccacgtttcaggtggtccagcagacggcccggagtaccgacaacgatctgcggcccctgacgcagggcgcgtaattgcacgtcataacgctggccgccgtacagagcaaccacatttacgccgcgcatgtgtttagagaaatccgtcattgcttcagcaacctgtaccgccagttcgcgggtcggtgccagcaccagaatctgtggtgctttcagctcaggatcaagattctgcaacagaggtaaagagaatgctgcagtttttccgctccccgtctgggccatacccagaacgtcgcggccattcagcagatgtggaatacactctgcctgaattggagatggtttttcgtaacccagatcgttaagggcttcaaggataggagccttcaggcccagatctgcaaaagtggtttcgaattcagccatgtagtacgtgtgcctcaaaattaatggcggccagtctacataactcatcatgaaattgatcagcaattttcattgaaaagtgtgaaccggctcaaagtaggtgtattaacgaacaacaacgccctcacccgttaaggtgatggcaatcaaaaaagattacgggctgatgtgtacgtcagttattgctggtcgctttctgccaggtcatcttggtcctggcccaggaggcttaattccaacaatgcgtatcggtgctcaacaaagttatgaacgttgttggcaaccgccagtttgaacagtgccgtggcgctgtccaaatcccccagacttaggtagtacttacctaaatagaagttggtttcactgagatgctcagcgaggctggtgttatccgttgcgtccgccttgagcctttccattaacgtttgttcgctaatgttgcccaggtagaactcgacaatgttccatccccactgttccttatcgcttttttcgaagtgctgtttcaacacttctttagcctgcttctcatcgagcttctgctcggcgagataaagccacagactacggaaaggatcattgggatcgtcttgataaaacgccagcagatcatcttgcgctaacttgtcacgaccgccgtaatataatgcgatcccgcgattcaagtgcgcgtagttgtaagttggatcaagctcaagtacagaatcaaacgcttcataggcagcatcaaaattgcctgcctgcgttaaatatatgcctaagtaattgaatacttcaggcatatccggtcggattgccagcgcttggctaaaatcgttacgcgctaatgccctcagaccgagactatcatacaacactccgcgctcatataaaagctgtgcgcgttcgtcatcggttaaagcccgactggcaaggatttgttccatacgtgccagaatcacttcctgctgtaaagtcggttgcaatggtaccgcgaggacttcacttttacgccaggaagtattactgcatcctgcaagcgtaagtgctgtcgcaacgaaacaccagcgcaaaaaaggcttcatttcccactcccgaagaccacggttgaatgaacgtcctgttcccggttgctaacaaggcgtcctgcccggttaaaagccccccgccgcagcggagggcaaatggcaaccttactcgccctgttcagcagccggagcttccggtgctgcagcaggttgagactgctcagtcgcttctttaatgctcagacggatacggccctggcgatcaacttccagaactttcaccggtacttcctgacccatctgcaggtaatcggtcactttctcaacgcgtttgtcagcgatttgagagatgtggaccagaccttctttaccgccgccgatggcaacaaatgcgccaaagtcaacgatacgggtcactttaccagtgtagacgcggcccacttcgatttctgcagtgatctcttcgatacgacgaatagcatgtttcgctttctcgccgtcggtcgctgcaatcttcacagtaccgtcatcttcgatttcgatggtggtgccagtttcttcggtcagagcacggattacagaaccgcctttaccgataacatctttgatcttgtccgggttgatcttgatggtatggatacgcggtgcgaactcagagatatcgccacgcggcgcgttgatcgcctgttccattacgcccaggatatgcagacgcgcacctttagcctggttcagcgcaacctgcatgatctctttggtgataccttcaattttgatatccatctgcagtgcagagataccgtcgcgggaacctgcaactttgaagtccatatcgcccaggtgatcttcgtcgcccaaaatgtcagacagtacaacgtagttgtcgccttctttcaccagacccattgcgatacccgcaacggcagctttgatcggcacacctgcgtccatcagcgccagagacgcgccgcacacggaagccatagaagaggaaccgttggattcagtgatttcagacacaacacgtacggtgtacgggaatttgtccatatccggcatgactgccagcacgccgcgcttcgccagacgaccgtgaccaatttcacgacgcttcggagaaccgaccatgccggtttcgcctacggagtacggagggaagttgtagtggaacaggaaggtatcggtacgttcgcccatcagttcatcaagaacctgcgcgtcacgagcagtacccagcgttgcggtaaccagcgcctgcgtttcaccacgggtgaacagcgcagaaccgtgagtacgcggcagcacgccagtacgcacatccagaccacggatcatatctttttcacgaccgtcgatacgcggttcgcctgccagtacgcggctacgaacaacgtttttctcgatcgcgtgcagaatttcacccagttcgttttcgtccagggtttcgtcttcagcaagcagcgtcgcgatggtttcagatttgatgacatcaacctgcgcataacgctcttgtttgtcggtgatgcggtaagcatcgctcaggcgagcttcagccagtgcagcaacgcgcgcgtttagcgcttcgtttaccggctccggctgccagtcccaacgcggtttaccggcttctttcaccagttcattgatgttctgaataacaacctgctgttgttcatgaccgaacactactgcgcccagcatctggtcttcgctcagcagttgagcttcagattcaaccatcagtacagcggcttcagtaccggcaacaaccagatccagtttgctctctttcagctcgtcctgagtcgggttcagtacgtactggtcattgatgtaacctacgcgggcagcaccaatcgggccattgaacggaataccagacagagacagcgctgcggaagcaccaatcatcgcgacgatatccgggttaacttgcgggttaacagaaaccacggtggcgataacctgaacttcgttgacgaagccttccgggaacagcgggcgaatcgggcggtcaatcagacgcgcgatcagggtttcgccttcgcttgggcggccttcacgacggaagaagctacccgggatacgaccagcagcgtaggtacgctcctgatagttaacggtcagtgggaagaagtcctgacctggtttggcttttttctggccaacaacggtaacgaataccgcggtgtcatccatgctaaccataacagcggcagtagcctgacgagccatcatgccggtttccagagtcacggtgtgttggccgtactggaatttacgaacgatcggattaagcaatgtaatatcctttctctttcttagacagtaccttacggcactggtgttaataccgcttcttctgcgcatcctcgcgactaatgacaaccctaacccagctctatgtgggtaaagcctctcattagccgcgcgaacctctgcaacggaagatcattcatagcaacaatacattagtttccagtgaattgctgccgtcagcttgaaaaaaggggccactcaggcccccttttctgaaactcgcaagaattagcgacgcagacccaggcgctcgatgagctgggtgtaacgtgctacgtctttacgtttcaggtagtcgagcagtttacgacgctgagaaaccatgcgcagcagaccacgacggctgtggtgatcttttttgtgctctgcaaagtggccctgcaggtggttgatctgtgcagtcagcagtgctacctgaacttcggtagaaccggtgtcgtttgcgtcacgaccaaactcagaaacgattttagctgttgcttcagtacttagagacattttaaaactccaaagtatatagaatgaaaggacgccgatctctaattcagcgatcccagtgtacgttacgcaaagtgttaaacaatttacgcgacgttaagcggcagtattctactcgtagcgacctgttatcgcaagacggttaacattacgccgggtattcaaccaccaggcgacgaggcgcaacgcggccttcatcgtcaatttcgcccataccgataaatttgccgttctcaccttccgtgacgcgaaccagtccttccagtggcgcaccagatgtacgaaccgggttaccatttttgaagtaaacagaagacgttaacggaagattcaccaccggatagtcgctagctggactgtccattggcatcagtaatggatcaagtaactccgcggctggaatatcctgctgttcagcttgctcaacaagttcacgcaggtgctccagggtcaccatccgttcaaccggatatttacttaccgccagacggcgcaggtaaataacatgcgcgccacagccgagtttttcacccaggtcatcaatgatggtgcggatataagtgcctttactgcagtgaatttccagctccagctcattgccttcatggcgaataaacagcaattcataaacggtaatcggacgcgcttcacgcggaacttcaatgccctgacgcgcatattcgtacagttttttgccctgatatttcagtgcactatacatgctagggatctgttcgatatcgccacggaaagtatccagtgccgctgccagctgctctgcgctaaaggttaccggacgttcttcaacgatctgtccgtcggcatcagaagtatcggtacgctgtccaagacgcgcaatgacccgatagcgtttgtcggagtccagcagatactgggaaaacttcgtcgcttccccgaggcaaatcggcaacatgccggtcgccagcgggtccagcgcaccggtatgcccggcacggttggcgttatatatacgtttcactttttgcagcgcatcgttgctggacataccctgaggtttatccagcaacaaaacgccgttaatgtcgcgaccgcgacgacgaggacgactcattagtcctccttgctgtcgtccgggttaacacgacgttcttcgtcatgtttgaccacgctggtcaccaggttactcatgcgcatcccttcaaccagagagttgtcgtagaagaaggtcagttccggcacgatacgcaggcgcatcgctttccccagcaggctgcggatgaaaccagaagcttcttgcaacgctttgatgcccgctttaaccgcgtcttcatctttgtcgttgaggaacgtcacatatactttggcatacgccaggtcgcgagacatttcgacaccggaaacggtggtcatcatgcccaggcgaggatctttaatttcacgctgcaggatgagagcgatctctttttgcatttcctgcgctacgcgctgcgggcgaccaaattctttcgccataataaattctcctgacaaaaaaggggctgttagcccctttttaaaattaatttcaggtggaagggctgttcacgttgacctgataagacgcgccagcgtcacatcaggcaatccatgccggatgcagcgtaaacgccttatcccgcatggaaccctaaaaaccttaagcaatggtacgttggatctcgatgatttcgaatacttcgatcacatcgccagtgcggacgtcgttgtagttcttaacgccgataccacattccataccgttacggacttcgttaacgtcatctttgaagcggcgcagggactccagctcgccttcgtagataaccacgttgtcacgcagaacgcggatcgggttgtgacgtttaaccacaccttcggtaaccatacagcctgcgatggcaccaaatttcgggcttttgaacacgtcacgaacttccgccagaccgataatctgctgtttcagttccggagacagcataccgctcatcgccgctttcacttcgtcaatcaggttatagatgacggagtagtaacgcagatccaggctttccgcttcaatcactttacgtgcagaggcatcagcacgtacgttaaagccaaccaggatggcgttggacgccgcagccagggtggcgtcggtttcggtgataccacctacgccagaaccgatgatcttcactttaacttcgtcagtagacagtttcagcaaggagtcggagatcgcttcgacagaaccctgtacgtctgccttcaggacgatattcacttcgtgaacttcgccttcggtcatgttggcgaacatgttctcgagtttagatttctgctgacgcgccagtttaacttcgcggaatttaccctgacgatagagtgcaacttcacgcgctttcttctcgtcacgtacaacggtaacttcatcacccgcagccggtacgccggacaggccgaggatttccaccggaatggacggacccgcttccagcacttcctgacccagttcgttacgcatcgcacgaacacgaccgtattcgaagccacacagaacgatatcgcccttgtgcagagtaccttcacgtaccagaacggtagcaaccggaccacgacctttatcgaggaaggattcgataaccgcaccgctcgccatacctttacgtaccgctttcagctccagaacttccgcctgcagcaggatagcgtccagcagttcatcgataccggtacccgctttcgcagatacgtgtacgaactggctttcaccgccccactcttccggcaggatgccgtactgggagagttcgttcttaacgcgatccggatcagcttctggtttatcgatcttgttcactgcaaccaccaccggtacctgcgccgctttcgcgtgctggattgcttcgatggtctgcggcatcacaccgtcgtcggcagcaacaaccaggactacgatgtccgttgcctgcgcaccacgagcacgcatactagtaaacgcggcgtgccccggggtgtccaggaaggtgatcatgccgttttcagtttcaacgtggtatgcaccaatgtgctgggtaatgccgcccgcttcgccagaggccactttcgtactacgaatgtagtccagcagagaggttttaccgtggtcaacgtgacccatgatggtcacaaccggcgcgcgcggttcagccgcagcacccgtgtcacggtcgctcattaccgcctcttccagctcgttttcacgacgcaggataactttatggcccatctcttcagcaaccagctgtgcggtttcctgatcgataacctggttgatggttgccattgcgcccagtttcatcatcgctttgatgacctgagagcctttaaccgccatcttgttcgccagttcgccaacggtgatagtttcgccgatcacaacgtcacggttaacggcctgagcaggcttctggaagccttgctgcaggctagaacctttacgttttccgcctttaccgccacgtactgctgcgcgtgcttcttcacgatcagctttactttcagcgtgtttgttgcctttcttcggacgcgctgctttcgcgttacgaccacggccacggccgccttcgacttcacgatcgctttcgtcttctgcctggcgagcatgttgagaagtagtgacgtgataatcgctggaatcttcagtcggttccgcgttatcagtccatttgttttcttccgccatacgacgtgcttcttcagcaacgcgacgtgcttcttcttcgagtttacgacgcgcttcttcttcagctttacgcttgagctctgcagcttcctgctcacggcgggctttttcagcctgggcgtttttagtcatatcgtcttgttgattgctcactttgtctttttccgcagcttcacgtttcgcttgttcagcagcttcacgcttagcttgttctgcggcctcacgttcagctttttgttgcgcctcgcgtttagcgctttcttctgcctcacgacgggcttgctcttccgcttcacgctgcgcttgctcttccgctgcaaggcgttcagcctcttgcggatcgcgtttcacaaaggtgcgtttcttgcggacttcgatttgtacgcttttgctttttccaccggtaccaggaatgttaagggtgctgcgtgttttacgttgcagcgtcaatttgtccgggccactatttttctgattcaggtggtcaatcaaagtctgtttctcttgtgcagacacagagtcgtcagcagacttccggatacctgcatcagcaaattgctgtaccaggcgttccacggaggtctgtcgctctgcggccagcgttttaatcgttacatctgtcatgctgttccttcctgctacagtttattacgcttcgtcaccgaaccagcaaatattacgggcagccataatcagtgctccggctttttcgtcggtcaacccttcgatatcagccagatcatcaatgccctgttcggcgagatcttccagcgtacaaacgccacgggcggccagtttgaatgccaaatcacgatctaccccttcaaggttcagcagatcgtcagccggtttgttatcaccgaggctttcttcctgggcctgtgcaatggtggccagtgcatttttagcacgctcgcgcagtgcttcaacggtcggctcatcaaggccttcgatttccaacagctctttcatcggcacataggccaattcttccagcgtgctgaagccttcttctaccagaacagtcgcgaagtcttcgtcgatgtcgagatatttggtgaaggtgtcgatcgctgcgtgcgcttccgcctgatgcttagcctgcaggtcgtcaacggtcatcacgttgagttcccaaccgctcagctggctagccagacgcacgttctgaccgttacggccaatcgcctgcgccaggttaccggcttcaacggcgatatccatggtgtgtttatcttcatccaccacgatagaagcaacgtctgccggtgccattgcgttaatcacgaactgcgccgggttatcatcccacaggacgatatcgatacgctcgccacccagttcagtagacaccgcctgaacacgcgcgccacgcatacctacgcaagcacctaccggatcgatacgtttatcgttggttttcaccgcgattttcgcacgagaacccggatcgcgagccgctgctttaatttcaatcacttcttcgccgatttctggcacttcaatacggaacagttcgatcagcatttccggcttggaacgagtgacgaacagttgcgcgccacgcgcttccgggcgaacggaatagagcacgccacgaacgcggtcgccagggcggaagttttcacgcggcagcatatcttcgcgcaggatcacggcttcagcgttgttgcccagatccagagagatgttgtcgcggtttacttttttcaccacgccggtgatgatttcaccttcgtgttcacggaactgatcaaccaccatcgcacgttcggcttcacgcactttctgcacgataacctgttttgccgtctgggtagtgatacggtcaaaggtaacagactcaatctgatcttcaacgtaatcgcccaggttcaggctttcatcttcataacgtgcggcttcaagggtgatttccttggtcggctgggtgacttcatcaacaactaaccagcgacggaaagtgtcaaaatcaccgcttttgcgatcgatctgtacgcggacgtcgatctcttgttcatattttttctttgttgctgtcgccagcgcgctttccaatgcttcgaaaatcttctcgcgaggtagcgccttttcattggatacggcttcaactacagccaaaatttctttgttcatcgcgggcttttcacctcatccagactattaaaagtggggaaccaggttcgccttctggatattactcagcgcgaacacttcatctttaccttcgacggtaactgtgatcatttcaccgtctaccgctttgataacgccctgccatttacgacggttttgtaccgccatacggagaaccagagtcacctcttctccgacaaaacgggcgtagtgttcagccgtgaacagtgggcgatcgagacccggactggagacttccaggttataagcaacggtgatgggatcttcaacatccagcacagcacttacctggtggctcacatcagcacaatcatcaacattgatgccatcttcactatcaatatagatgcgcagtgtggatgtgcgaccgcgaataaattcgatgccaaccagttcaaaacccagggcctcaactggcgcagtaatcatctctgttaatttttgctctaatgtggacaagcccacccccaagacataaaaaaagggcctaaagcccagttattctgtagtcagataacaaaaaaccccgataaatcggggctttatataactgaaccctataaccgcaactgcggtctggagcactttccagaaggattttttcaaatcccactacgaaggccgaagtcttcacagtatatttgaaaaaggactctaagggaaagtggttgcgggggccggatttgaaccgacgatcttcgggttatgagcccgacgagctaccaggctgctccaccccgcgcctgaaacgtggcaaattctactcgttttgggtaaaaaatgcaaatactgctgggatttggtgtaccgagacgggacgtaaaatctgcaggcattatagtgatccacgccacattttgtcaacgtttattgctaatcatgtgaatgaatatccagttcactttcatttgttgaatacttttgccttctcctgctctcccttaagcgcattattttacaaaaaacacactaaactcttcctgtctccgataaaagatgattaaatgaaaactcatttattttgcataaaaattcagtgagagcggaaatccaggctcatcatcagttaattaagcagggtgttattttatgacgacgattctcaagcatctcccggtaggtcaacgtattggtatcgctttttctggcggtctggacaccagtgccgcactgctgtggatgcgacaaaagggagcggttccttatgcatatactgcaaacctgggccagccagacgaagaggattatgatgcgatccctcgtcgtgccatggaatacggcgcggagaacgcacgtctgatcgactgccgcaaacaactggtggccgaaggtattgccgctattcagtgtggcgcatttcataacaccaccggcggcctgacctatttcaacacgacgccgctgggccgcgccgtgactggtaccatgctggttgctgcgatgaaagaagatggcgtgaatatctggggtgacggtagcacctacaaaggaaacgatatcgaacgtttctatcgttatggtctgctgaccaatgctgaactgcagatttacaaaccgtggcttgatactgactttattgatgaactgggcggccgtcatgagatgtctgaatttatgattgcctgcggtttcgactacaaaatgtctgtcgaaaaagcctactccacagactccaacatgcttggtgcaacgcatgaagcgaaggatctggaatacctcaactccagcgtcaaaatcgtcaacccgattatgggcgtgaaattctgggatgagagcgtgaagatcccggcagaagaagtcacagtacgctttgaacaaggtcatccggtggcgctgaacggtaaaacctttagcgacgacgtagaaatgatgctggaagctaaccgcatcggcggtcgtcacggcctgggcatgagcgaccagattgaaaaccgtatcatcgaagcgaaaagccgtggtatttacgaagctccggggatggcactgctgcacattgcgtatgaacgcctgttgaccggtattcacaacgaagacaccattgagcagtatcacgcgcatggtcgtcagttgggccgtctgctgtaccaggggcgttggtttgactcccaggcgctgatgctgcgtgactctctgcaacgctgggttgccagccagatcactggtgaagttaccctggagctgcgccgtgggaacgattatagtatcctgaataccgtcagtgagaacctgacctacaagccagagcgtctgacgatggaaaaaggcgacagcgtgttcagcccagatgatcgtattggtcaattgaccatgcgtaacctggatatcactgatacccgcgagaaacttttcggttatgccaaaactggcctgctttcctcctctgccgctagtggcgtgccgcaggtggagaatctggaaaacaaaggccagtaattcgacatcaaccctgcccttcaggggtggggttaccttgcttatcctctgtaaactcctttctgagcatcacataatcgaaaacatcatggtttgcatccacaacccgactgtctcctttatagtgtgcaatcacttcctcaagcgtttgcggctgttccggctttgttacccccatccacgcattaataaggtaattattgtaagctgtgctaaagatgttgttttccgttgtgcgatccacgccatccccaagaacggggctataccagataaacatcgggacatgatatgcctgctggctagcctccctgcctccatgaaaatagacgttcttcttcgtagggtcacgttccaggccgtggtcggcaaaatacatgacgctggcgcggcgatcttttaataattcaaaaacctgacctagcaaactatctgtgtaatgaatggagttgtcatagcaggcatcctgatcgtcctgcggttgaaacacggcgctggattgcggataggcgctacaagccggttcatggcttccatttaaatgaagaacaatcagtttcttttgctgcgtattttgctgtaatgcttggcttaaatgcggcaacaacaattcatcaaatcctctgacataaactgtttccatggcgcgcatggcgatactggtaactgctgtaccattctgccgaaaagcggattggctgcttagccagaaagtctgaaatcctgcttgattagccatattaataatgttgtcggggtaattatgaatgtcatgactcaaaacagaatcagcagttaaagaaaggggaacgctcagcgcagtgtaaggtgcgccgcttattgcttgattaaacagtttgatctgttttctttgtgcttcaacttgcggtgtcgtagagcgtgtatatccatacaaagacatattgtcgacacgtacagactcccccacaatcaacacgtaggtatcaatacctgtatccctgacacttaattgaaaatacggcaccgtgtttgcaatactgagtaatctttgatgctctttcgctgctaaagcaaaatagttgagattgaaaaacggcgtataggtagcaaatcggctcgctagtatatatggactgaacgcttttttattttttgcatctttataagcaaattgacaagcggaaaataaactgccgctaatgacaatcagcaataatattcctgtcactttttttgtcggcaaggaaacatcatattttattattactgccaaaaaaagaagggataaaaaagcaaaggcacatagataagggatatacatccccagcattttgacaacttcatccggatcactctggagcacactaatcgcaaatccatcattgaaagttgtaccaaaggtacaccaactatagaggctaatactcatgtctgccgcagtcagtaacacaaatggtgcggcaacaagcaggcgaagcggaagggaacttatacgttttacaaccaggatggtcagaacgaagaacagcaagcgctgaaccatatgcgctccggaagaagcgactaagttcgtaataccaaaaacaataacacaaagatacaacaaccaatgagatttaaaagttctagcaaatttgttgaatactgtcatccagaaatccaagttcacaaccaatataaacaattatcaacaatgtttaattttatatcagacatgtttttcaactctgatccatatcagaacgaaacactgttagttttttctttttaaatgatgcggccattgcgttctcagtaattaaataacattatcaatgcgtctctaaacattacgcagaacgtagccatcagtcgttatactgacaggagcaggatggtttatcgagaagtaaacatatccgtattcgtaccggaactggagttgacacaataaagtgccaattatgtcagtagaagggaaaaatttataactaaggcgtaccggcaccatcgtttcaaggtaccagctacgagtaaagcaactggacgagatacagatacctgacaaccattcctcagaccaggaccaaaacgaaaaaagacgcttttcagcgtctcttttctggaatttggtaccgaggacgggacttgaacccgtaagccctattgggcactaccacctcaaggtagcgtgtctaccaattccaccacctcggcacggatactactttttagttcgggatatcgctggtcggcttagccggagcagctggctgagtttgttcggttttcgccggtgcactcagattttcccattcgctacctttattggttttgttgctattgatgttacccagcaccagactgatgatgaagaataacgttgccagcagcgccgtcatgcgggtcatgaagttaccagaaccactactaccaaacagcgtagcggaagcgcctgctccgaaggaggctcccatatcagcgcctttaccttgctgcagcatgatcagaccaacaaggccaattgccacaataaggaaaactactaaaagagcttcatacataatcaacctgttccttgcggagttgccgcgtaccaatgcttcaaccaataaagcgggagtttttaatctttcccactgaagcgggtgtgaatactaaccaaagcgaatgaccttcgcaagggcaattttatcgcattgtatcaactgcggaaaaaaacagcaaaaccgatgtgttcgctgagaaaaaaggcgacaatcgccgcctttttagccagttatctaacgctttaaacggcttttactgcatcggcgatgcggtgtgcaaattcagtcacctgcgcttcgtcttcgccttccaccatcacgcgaattaacggttcggtgccggatttacgcagcaacacgcgtccacggttgcccagcgcagcttcaacctctgcggtcacggctttaacactctcatgctcaagtggatcgccgctacctgcggtgtaacgtacgttaaccagaatctgcgggaacattttcatgccgctgcaaaggtcgtgcaggctcatatggttacgtgccatcgccgccagcacctgcaagccagcaacgatgccgtcaccggtagtagttttatccagcaggatcacatgaccggaattctctgcaccgatacgccagcctttctcctgcattttttccagtacgtagcggtcacccactttcgcgcgcgcaaatggaattcctaactgtttcagcgccagttcaagccccatgttgctcatcaatgtacccacagcgccaccacgcagctggccctgacgaagaccttcacgcgcgatgatatacatgatctgatcgccatcgactttattgccttcatggtcaaccataatcacgcgatcgccatcgccgtcgaaggcaataccgagatccgctttttcagccagcacacgagcctggagcgcgcgaacgtcggtagcccccacttcggcattgatgtttacaccgtttggctcacaaccgatagcgataacgttcgcccccagttcgcgcagcacgttcggcgcgatgtgataagtcgcaccgtttgcacaatccaccacaatcttcagttcactgaggctaagttcgttcgggaacgtggctttgcaaaactcgatatagcgacccgcggcatcaacgatacggctggctttacccagttctgcgctatcaacgcagctgatctccttttccatttccgcttcgatggcctcttctaccgcatccggcagtttggtgccgtcgatagagaagaatttaatgccattatcgtagaacgggttatggcttgcagatatcacaattccggcctctgcgcggaaggtacgcgtcagataagccacggccggtgttggcatcgggccagtgaagagtgcggaaaggcccgctgccgccagacccgcttccagtgcactctccagcatatagccagaaatacgcgtgtctttaccaataataatcttacgggagccgtggcgcgccagcactttacccgcggcccaacccagcttaagcacaaaatcaggtgtgatcggcgcatcccctacacgaccacgaatcccatcggtaccgaaatatttacgattactcatagcgtttgttttcctttgcagacagagtggcttccaccacccgcatcgcttctacggtttctttgacgtcatgaacacgaatgatgtgcgcgccttgcattgcggcaatgaccgcacaggccagactaccgctcaggcgctcggacggccccacgttcagcagctgcccaatcatgctttttcgactcatacccaccaacagcggcaggttgaaatggtgaaattcagccaggcgcgccagtaaactatagttatgggagagatttttaccgaaaccgaatccggggtcgagcaacaatttctcttttgcgatacccgcctgctcgcaacgtgctatttgctcaataaagtagcgattcacttctgcaaagacatcgtcatacttcggagcttcctgcatggtttttggatttccctgcatatgcatcagacaaaccggtaaaccggtttctgcagccgcctccagagcgccaggttcggaaagggagcggatatcattaataatgtgagcgccaactttcgcactctcacggatgacttctggtttggatgtatcgacactgatccagacttcgaagcgttgagcaattgcctcaaccacaggaataacacgttgcaactcttcttcaacgctaacttccgccgcccctgggcgcgtggactcgccaccaacgtcaatgatcgtcgcgccagcgttgatcatcagattcgcatgtttcaccgcatctatcaggctgttatgcgtgccaccatcgctaaaggaatcaggcgtgacgttgaggatccccattacgtgaggatggctaaggtccagactagtaccctgggcaaagagtttcatgatgttatccctggtatgaattgataagaaaaaaccccggagcacgccccggggttttcggtacaaatacagtcatctgatgcgggaacttacttgtcgcctaactgctcactcatggtgttacccgggttcggcgtacgcggttcatcaaccggacgaggagcctttggactaccattgtcgccagaattgttagaagcgcctggttcttcccagcccgctggcggacgtacatcgcgacgtgccatcaggtcatcaatctgcggtgcgtcgatagtctcatatttcatgagagcatctttcatcgcatgcagaatatccatattgtcggtcagaagctgacgcgcacgattatagttacgctcaatcagtgctttcacttcctggtcgatgatacgtgcagtttcatcggacatatgtttcgctttcgctacgctacggccgaggaacacttcaccttcttcttccgcgtacagcagtggacccaatttctcagagaagccccactgagtcaccatgttacgtgccaggttggtcgcaactttaatatcgttggacgcaccggtagatacatgttccggcccgtagatgatctcttctgccagacgaccaccgtacagcgtagaaatctggctttccagtttctgacggctggcgctgattgcgtcgccctcaggcaagaagaaagtcacacccagcgcacgaccgcgtgggataatcgtcactttgtgcaccggatcgtgttccggcaccaggcgaccgataatcgcatgacccgcttcgtggtaagccgtgctttctttctgcgcttccgtcatcaccatggagcgacgttccgcacccatcatgattttgtctttcgctttctcgaactcaaccatgctcacaacgcgtttgttgccacgagcagcgaacagtgccgcttcgttcaccaggttcgccaggtcagcaccggagaaaccaggagtaccacgggcaatgattgccgcgtcgatatcgggtgccaatggtacgcgacgcatgtgaactttcaggatctgctcacgaccgcgaacatctggcaagccgaccacaacctgacggtcgaaacggccaggacgcagcagggccgggtcgagaacgtccggacggttagtcgcggcgataacgatgataccttcgttaccttcgaagccatccatctcaaccagcatctggttcagagtctgttcacgttcatcgtgaccaccgcccagaccagcgccacgctggcggcctacggcgtcgatttcatcgataaagatgatgcacggtgccgctttcttcgcctgttcgaacatgtcacgaacacgggatgcacccacaccgacgaacatttctacgaagtcagaaccggagatagtaaagaacggaactttcgcttcgcctgcaatcgctttcgccagcagcgttttaccggtacccggaggaccgaccatcaagacgcctttcgggatcttaccgccgagtttctggaagcggctcggctcgcgcagatactcaaccagttcagcaacttcttcttttgcttcgtcgcagcccgcaacgtcagcaaaggtcgttttgatctgatcttccgtcagcatgcgcgctttgctcttaccaaagctcatggcacctttgccaccgccgccctgcatttgacgcatgaagaagatccagacaccaatcagcaacagcatcgggaaccaggagatgaagatagaagccagcaggcttggttcttcaggcggttcaccgacaaccttgacgttcttggtcaacaggttatccagtaatttcggatcctgaaccggaatgtaagtggtataacggttactatctttcttggtaacgttgatttcacgtccgttgatacgcgcttcacgaacctggtcgttattgacctcttgtaggaaggtagagtaatccaccttacggccattagactcgctgggcccaaagctctggaatacactcatcagcacaacggcaatgaccagccagagtattaggtttttcgccatgtcactcaagggattaacctcttattacaactgtgttaaaaacagcgtcaggatactctatatccagcatctttcaaactttcgtctgaaatctcccggttagggtttacgcccggtcgctacaatatacacttcccggctacgtgcacgagaagagtccagcttacgaactttgaccttcgtaaacagggagcgaatttcccttagatactcatcgaaaccttcgccctggaacaccttcactacaaaactgccacctggcgctaatacatcacgacacatttctagcgccagttccaccagatacatggcacgggggatatccaccgccggtgttccgctcatgtttggtgccatatcggacatgacaacctggactttgctgtcgccaacgcgctccagcagtgctttcatcaccagttcatcacgaaaatcgccctgaagaaagtccacaccaacgataggatccataggtaaaagatcgcaagcgatgatgcggcctttgccgccaatttgggtgaccacatattgactccaaccacccggagcagcaccaaggtcgacaaccgtcattcccggtttaaagagtttgtcactttgctgtatttcatcaagtttaaaccaggcacgggaacgtaacccctttttctgtgcctgttgaacatatttatcgctaaagtgttcctgaagccagcggctggagctggcagaacgcttcttacctgtcatttaactttcccatggggataactcatcgtaaccaattgcgtaaatttttacgcgcctatttggtgatatatgggagatggcggtagaatgacccgttttcaatcccaacgtaagcaaaaaatacgatgaatctgagtactaaacaaaaacagcacctgaaaggtctggcacatccgctcaagccagttgttctgcttggcagtaatggtttgaccgaaggggtgctggccgagattgaacaagcgttagagcaccatgaactcatcaaggtgaaaatcgccaccgaagatcgcgaaactaaaaccttgatcgtggaagctatcgtgcgcgaaaccggcgcctgtaatgtacaggtcatcggtaaaacgctggtgctttatcgcccaactaaagaacgtaaaatcagcctgccacgctaagattatcctaaagttacacacatttgctgtgtaaaacgaggggttttccgcaggcaggagagcaaaatgccacgctctgttcgttgataaaaggccgcatagcggcctttttcctttctttacaatacatcaacatcttgagtattgggtaattcttacaggtattccaccttaattacttcaaattctacttcgccgcccggcgttttgatgaccacaacatcatcttcttctttgccgatcaggccacgagcaatagggctgtttacagaaatcaggttttgtttaaagtcagcttcgtcatcgccaacgatgcgataagtctgttcttcgtcagaatccagattcagcaccgttacggtagcaccaaaaataacgcgcccattgttgggcattttggtgacatcaatcacctgcgcgttgctcagcttggcttcgatgtctttaatacggccttcgcagaaaccctgctgttcacgagctgcgtggtattcggcgttttctttcaggtcgccatgctcacgcgcttccgcgatagcagcaatgatttcaggacggcgcacagatttcagaaaatccagctcttcgcgtaatttttcagcgccgcgtaaggtcatcggaatagcttgcatttgttatacctcttgaatattcctgatagggcaagtcttcacccaccccggctgttcggcctgcccggcataactccttaccgggaccagaagcaaaaaaataccgacccgggtacaagtcccaggtcagctacaattcacattttgatagtcattttaccctgaagttcccgaagggtcatcgtttactttatagggcgttgcgccgtagtatgacggctcgattccaggttgttagcgcgagattatgcgattttccagatttatcatcggattgaccagctgtatagcgttcagtgttcaggccgcaaatgttgatgagtacattactcaactccccgctggtgccaaccttgccctgatggtgcaaaaagtcggcgcgagcgcccccgctattgattaccacagtcagcagatggcgctgcctgccagtacccagaaagtgattactgcgctggcggcgttgattcaactcggccccgattttcgttttaccacgacgcttgaaaccaaaggcaatgtggaaaacggcgtacttaagggtgacttagtggcgcgatttggtgccgatccgacgttaaaacgtcaggatattcgcaatatggtcgcgactttgaaaaaatctggcgtcaaccaaatcgatggcaatgtgttgatagatacctccattttcgccagccacgataaagcccccggctggccatggaatgacatgacacaatgctttagcgctccgcctgccgccgccatagttgaccgcaactgtttctccgtcagcctctacagtgccccaaagcctggtgatatggcttttatacgcgtggcatcttattaccccgttacgatgttcagccaggtacgcaccctcccccgtggttctgccgaagcgcaatactgcgaactggatgtggtgccaggcgacctgaaccgctttacgctgacgggatgcctgccacaacgttctgagccgctcccgttggcttttgccgtgcaggatggagccagctatgccggtgcaattctgaaagatgagttaaaacaggcgggtatcacctggagcggaacactgctgcgccagactcaggttaacgaacctggaacggtagttgccagtaaacagagcgccccgctgcacgatctgcttaagattatgctgaaaaagagcgacaacatgatcgccgatacggttttccgcatgataggccatgcgcgcttcaatgtgcctggaacatggcgggccgggagcgacgccgtgcgtcagatcctgcgccagcaagccggtgtcgatattggaaacaccattattgccgatggtagtgggcttagccggcataacctgattgcccccgccaccatgatgcaggtgctgcaatacattgcccaacacgacaatgaacttaactttatctccatgctgccgctggcgggctatgacggctctttgcagtaccgtgcaggtctgcatcaggcgggcgtggatggaaaagtcagtgcgaaaaccggtagcttgcagggggtatataacctggcgggattcattaccacagcgagcgggcaacgaatggcgtttgtgcaatatctttctggctatgcagtagaacctgcggatcagcgtaatcgccgtattccgttagtgcgttttgaaagccgtttgtataaagatatttatcagaacaattaatcaaaaagaaaccccggcacatggccggggcttcagattattgacaaagtgcgctttgtttatgccggatgcggcgtaaacgccttatccggcctacaaaatcgtgcaaattcaacatattgcaattctcttgtaggcctgataagcgtagcgcatcaggctgatttggcgtttatcatcagtgattaacgcttgtaaatgaactcaacgccttcttcgtcgtcttcgtcccagtcgtcatcccagtcttcatcatcctcttcagcaatctcttcaagctgctggcgatgataatcatcccacatgaattcgactttctctggctgtttcgcttcttcagcctgcacgaccgggttttcaatgataaaggtcatcacatcccagcagagatctttcacgcccagtccactcgccgcagagatcagataatatttatcttcccagcccagcgcctcagcgatcgctttcgctttctcttcggcttctaccttatccagcagatcgatcttgttgaacactaaccaacgcggtttcgtcgccagatcctggctgtatttttccagctcgctgataataatacgcgcgttttcaaccggatcggtgccgtcaatcggatcgatatcgatgaggtgcaacaggacgcggcaacgttccaggtgcttcaggaagcgaatgcccagacctgcgccttccgcagcgccttcaatcagtcctggaatatcggcaacaacgaagctcttttcgttgtccattcgtaccacacccagacttggcaccagagtggtaaacggataatccgccactttcggtttagccgcgcttaccgcacgaataaaggtgcttttacccgcgtttggcatccccaacataccgacgtcagccagcagcatcagctccagcagcagctcgcgcttatcgcccggcgtgccgttggttttctgccgcggtgtacggttaacggagcttttgaaacgggtattgcccagaccgtgccagccgcccttagcaaccagcagacgctgaccgtgtttggtcatatcgcccatggtttcaccagtaccctggtcgattacacgcgtacctaccggcactttaatcgtcacgtctttaccgcgcttaccggtacagtcgcggcttgcgccattctgaccgcgctctgcacggaaagatttttcaaaacgataatcgataagcgtgttcaggttctcgtcggcttccatccatacgtcaccaccatcaccgccgtcgccgccatccgggccgcctttcggaatatacttttcgcggcggaagctcacgcaaccattaccgccatcacctgcaacgaccagaatgcttgcttcatcaacaaacttcattttattctccgtaaatcattcgcctgcgcggggttggcttaccaccgttgtatgcttacgtaatccgccccaaatacgatgaccaatggcggaatacatcgcgcccgcaaccacgacaaacgcaccgagataacctaaaaggtttaacatcggtctggcgaagaaatcgggccaggccagacttaaaagatcactaaaaaacagcgtaaacagtggggtgagcgtgatgatcgcgctcacctgcgctgcctgccagcgagccatcgcttccgccagggcgccatatcctaccaaggtattcagtccgcaaaaaattaaacatgcgagctgccagtggctaagctgcgctatcactccaggctttgccagagggaagagcgcaattgtacataaagtgtacagtaaaaacaggatctgcggactggccagccgacgcaataaaaccttttgcgccacgccataactcacccaaaccgtcgccgcaccgaccccaaagataactccccaggtgtaatcggtgagctttgtaaatatctcgaccagactggtgttaaaaaacatcaccaggccgctcaggagcatcaatgcccctacaacctgagtgctgcgcattttctctttgaggataaatacgctggcaaccatcatgccaactgggctgagttgcccaatcacctggctagcggtcggactcaggtattgcaaggaactgctgaacaggatgaagttcccaaacagcccggcggtcgccactgccaacaaaatcaaccagcgtggcttacgaaacacgcgtaatggcggcaacctcttcttcaccgcaagaatggcacccaggccaatactcgccatcaagaaacggtaaaacacgattgtcggaggttccatcacctccagcacctgcttcattgcgattggcaacgccccccagcaaattgctgtggtgagcgccaaaagaatgccaatgcctgcctgctgcttcataccgtattccctgcaaagcgcatttgcggattaacgtcgcaccatgcgcatttttaccggttatcgaatgtaaaaagccccgcaacgtgttgcggggctttcatccgttaccgggacgcgaaaaacttattcagcttcgatgctgataaatttacggtttttcgggcctttaacttcgaatttcactttaccgtctgctttagcaaacagagtgtggtcacgaccgcaacctacgttagcgccagcgtggaatttggtaccacgttgacgaacgatgatgctacccgccagaacggattcgccaccgaaacgcttaacgcccaggcgtttagcttcactatcgcgaccgttacgtgtggagccgccagcctttttatgtgccatttgaaatctctcctcaggtcttaggcgctgatgccagtaattttcacatcagtgaaccactgacgatggccctgctgcttacgatagtgtttacgacgacgaaacttaacgattttaactttctcgccacgaccgtgagcaacaacttcagctttgattacgccgccatcaacgaaaggaacgccgattttgacttcttcaccgtttgcgatcatcagcacttcagcgaactcaacagtttcgccagttgcgatgtccagcttttccaggcgaacggtctgaccttcgcttactcggtgttgtttaccaccactttggaaaaccgcgtacatataaaactccgcttccgcgcacaccttttcaatgattcagagtgcgctataaatattcacaatagggcgcgaatattacgcaaaacgcacgcctttgacaagtgctacagtcaatacacgaagaaaaaaaacacaacttgtacggtaacgtttatctgtgccattttttcagtacaatcaccctatattcctaaccataaaccctaagttgcctttgttcacagtaaggtaatcggggcgaaaagcccggcttttgcgatgaatttagaaaaaatcaatgagttaaccgcgcaagatatggcgggtgttaatgcggcaatccttgagcagcttaattccgacgtccaactgatcaatcagttaggctattacatcgtcagcggcggcggtaaacgtattcgtccgatgattgctgtactggctgcacgagctgttggctatgagggaaatgcgcatgtcaccattgctgccctgatcgagtttatccacacggcgactctgctacacgacgacgttgtggatgaaagtgatatgcgcaggggtaaagctaccgccaacgccgcatttggcaatgccgccagcgtgctggtaggcgattttatttatacccgcgctttccagatgatgaccagcctcggtagcctcaaagtgctggaagtcatgagtgaagccgtaaacgtcatcgcagaaggtgaagttctgcaactgatgaacgttaacgatccggacatcactgaagaaaactacatgcgcgttatctatagcaaaaccgcgcgtctgtttgaggctgccgcgcagtgttccgggattctggctggctgtacgccggaggaggagaaaggcctgcaggattatgggcgctatctcggcactgctttccagttgatcgacgatttactcgattacaatgccgatggcgaacagttaggtaaaaatgtcggcgacgatctgaacgaaggtaaaccgacgctgccgctgctgcatgcgatgcatcatggcacaccagaacaggcacagatgatccgtaccgccatcgaacagggtaacggtcgccatcttctggaaccggttctggaagcaatgaacgcttgtggatctcttgaatggacgcgtcagcgtgccgaggaagaagcagacaaagccatcgcagcgttacaggtgctcccggacaccccttggcgagaagcactcatcggcctcgcgcacatcgctgttcaacgcgatcgttaatcccctcccctcatcccgcgcagcgcgcgggatggttccagtaagttccataaaaacacttattcagctctataacacctgaaaaatagggatgtgcatctttatatattctgaatattcacactctttacaggaactttttagagcaataggccatcaggagtatagtgatgctcgacagaagaagtgttctgaatgaaagcgactaacttaaggagtgaggaaaaatggaaagtaatttcattgactggcatcccgctgacatcattgcgggtttgcgcaagaagggaacgagtatggcggcggaatctcgcagaaatggtttgagttccagtacgctggcgaatgcattaagccgcccatggccgaaaggagagatgattattgcgaaagccctgggaactgacccctgggttatctggccaagtcgctaccatgatccgcagacccatgagtttatcgacagaacgcagttgatgcgtagctacactaaaccgaaaaaatgagtggtctggcggtagccccgcgaacggggctgccagctctcagacgattattcgcctttcacacgctcaatatttgcacctaaagcgcgcagtttgtcttcaatgcgttcgtagccacgatcgatgtgataaatacgatcaaccaccgtcgtcccttccgcaatacagccagccagcaccaggcttgcacttgcacgcagatcggttgccataacctgtgcgccagaaagtttttcaacaccgtgacaaataacggtattgctttcgatttcggcgtgcgcgcccatacggctcagctctggcacatgcataaagcggttttcaaagaccgtttcggtgataaacccggtcccttctgccaccaggttcaacagcgtgaactgggcctgcatatcggtcgggaatgccggatgcggcgcggtacgtacgttaacagccttcggacgtttgccatgcatatccaggctaatccagtcttcgccgacttcgatgtccgctccagcgtcacgcagtttcgccagcacggcgtcgagagtatctggctgcgcgttacggcagataattttgccgcgagaaatcgccgccgccaccaggaaagtaccggtttcgatacgatccggcagaacgcgatagacaccgccgcctaaacgttccacaccttcgatgacgatacgatcggtgccctgaccgctaattttcgcacccagcgtaatcaggaagttcgcggtatcgacgatttccggttcacgcgctgcgttttcaataatcgtggtgccttccgccagggttgcagcacacatgatggtcaccgttgcgccaacgctgactttatccatcacgatatgtgcacctttcaaacgaccatcgacggaagctttaacgtaaccttcttccagtttgatggtcgcgcctaattgttcgaggccagaaatgtgtagatcaaccggacgcgcaccgatcgtacaaccgccaggtagactaacttgcccctgaccaaagcgcgctaccagcggccccagcgcccagatagaagcacgcatggttttaaccagatcgtaaggtgcgcagaatacattaacgtcgcgggcatcaatatgcacagaaccattacgttctactttcgcacccagctggcttagcagcttcatacttgtatcgacgtctttcagtttcgggacgttctggatctctaccggttcttccgccagtagtgcggcaaaaaggataggcagagcagcatttttagcgccggaaattgtgacttcgccctggagcttcgttggcccctgaacacgaaatttatccatttagtttgttctcagttaacaattcatatccgctaccggcgaatcgcccatagctcaaaagccgttcagtttgcgatcgcgcgcccactccgcaggggtatacgctttgatgctcacagcatgaatgcggttatccgcaatatattccatcagcggaccatagaccgtctgctgttttttaacccgactcatgccgtcaaacaactcacccacggcaataacctgaaagtggctgccatcgccggaaacgtggacttcctggagggagagagcgttcatcaacacgctctgaatttcattattttccatgggatcttcaatcatcagttaataaaccagcgaaacatcttagagcaaagttgcgctggcataaataagcaaaaagcctcgctgataaatcagacaaggctcgacttgcaggcaggtttgccggacaggcggttaacgccatatccggcctgaaaaaatttaacgaggcagaacatcagcaggcaaattatacaatttcgccagggtatacactttgtcgtttaccccctgaagcgtcacattgttgccctgctttttcgccagatcgataagatggagcagcagtgccagtccccccgtatccacgcgggagacacggctaagatcgatgcaggtaatccccttcaccgcttcctcacgcatttcccaaagcggtagcaaaacgtcctgatccagctctccggataacgccagcgtgtcacccgtctgcatccagctcagactctcgctcattattttttctcttccagagtgattttctgttgagaaatgcttttcagttgcgcagtcaggccgtcgatacctttggtacgcagcagcgttccccactcgttttgtttggtggtgatcatactgacgccttcagcaatcatgtcgtaagcctgccaattgcccgtctgggagtttttacgccactggaagtccagacgcaccggcggacggccattcgggtcaataatggtaacgcgaataggcacaatggttttatcgcccagcggctgttctggcgcaatctgataggtttgaccgtgatacatcgccagcgcctgaccgtaagcctgcttcaggtactcacggaaagcggcaaagtaggcttcacgttgagcaggggtcgcactcttgtaatactggcccagcaccagcgcaccggcgtatttcacctgtacgtatggcagcagttcctgatcaacaatggtacgcagataatccgggttggcccgaatttgcggttgctcattcttcaggcgatcgaacgttttctgcgccgcctcgtccatcagcttatacggattggtctggtctgccgcggttgccgcactcagaggtgcaatcaccagcaaagcgaccatcattaaacgtttaaacatgcgtcggttctcctgaaattatttcgttgtacccacaggttcagtggtttcattattacctggcgcagcagctggcgcatcgccactattcttattgtcatcgcctttactaccgtaaaggaactgaccaatgagatcttccagcaccatcgcagacttagtgtcctgaattgtatcgccatccttcaggatagcagtccccagttccgggtcttcaaaaccgacgtttaatgccagatattgttcccccagcaggccggaagtacgaatgctcaggctactggtatctggaatgtggttataacgttgttcaatttccagcgttacgcgcggcagataggttttcgggtccagcgtaatatccgccacccgacccacaacaacgccaccaatactgaccggagagcgcgctttcaggccgccaatgttatcgaacgtcgcataaagcgtgtaggtcggttcagtacgtatggacgtcacgttcgccgccttcaggcaaacaaacagcgccgccagcagtgctgctaataaaaagatacccacccaaatttcattttttttcgtttgcatgaactcaattcccaaacatcaatgcggtcagcacaaaatccagccccagaacagccagagagctgtggacaacggtgcgagtggttgcccggctaatcccggcagacgtcgggatggcgtcgtagccgttaaacaagctaatccacgtcaccgtgatggcgaacaccacgctcttaatcagacagttgaccagatccatacgccagtcgacggcattttgcattgcgctccagaagaacccgctatcaatgcctttccaactgacgccgaccagagatccgccccagatccccacggcgacgaaaataaccgtcaacagtggtaaactaataaccccagcccagaaacggggagaaataacccgacgcagcggatccaccgccatcatctccatactggagagttgctctgtagcgcgcatcaggccgatttctgcggttagcgcgctaccagcacgcccggcaaacaacaacgcggcaaccaccggccccagttcacgcagtaggcttaacgccaccagcatacccagactggtttccgcactataagtggtcagaaccagataaccttgcagccccaacaccattccgatgaacacgccagaaaccacaataatcagcatgctcaggacgccgacattatagagctggcgcaccagcagcggcgcatgtttgcgaaattccggtttgccgaccagcgcattgaataacattaacccggcccgcccgaacgttctcagggttttaatccctttatgtccgaggctcgccagcgcatttaacagcatgagtggcttaactccctggtaaaagatcagcgtgataatcgccggcaggatagcggaacggaacaggcccgtcagctatcccgtccagaaactgacgtacgcgcggatcaggattcgcctgcaacgcctgggcactgccatgagcgacaatttttttgtccgccaggatccaggcgtgatccgcaatacttaacacttccggcacatcgtgagaaaccaccacacaagtcacgcccagcgcgctgttcagctcagaaatcagcttcaccagtacgcccatggtgatgggatcttgcccaacaaaaggttcatcaaacatgatgagatccggctccagcgcaatcgcacgcgccagcgctgcacgccgcgccatcccaccggaaagttcagaaggcattagtttagccgctccacgcagccccacggcctccagcttcatcatcaccgtactatgcaacaatggcgcgggaagttgggtatgttcgcgcagtggataggcgacgttgtcaaatacgttcatatcagtgaacaacgccccggactgaaataacatgctcatccgtttgcgcactgtatacaggcggctacgagacatcgccggaatattctcaccatcgaaaaggatctcaccatgatctggtgcgatttgcccgccaatcagacggagtagcgtcgttttaccgatgccgcttggccccatgatcgccgtgatcttccctcgcggcacggtcagggaaatattatcgaagatgcagcgattgccacgcgtaaaactgacatcgcgcatatcgactaaattcgccacagactgctccataattcacccttcgtcttgcgttgattttctaagcatggcgctcaatttaaccttgaacccaacatatttacagaatattacccgccgtggttagcgaaagctggcatttgttttactttttagccgcataaagtcaaaattaagcatccgttacggctttctgaaaatcttcagcggaccggcgagtatacctgaagaaaggacgttagatgcttttagctacggcactgttaattgttggtttacttttggtcgtttacagtgccgaccgcctggtttttgccgcgtctattctttgccgaacctttggcatcccgccgctgatcatcggcatgacggtggtcagtattggtacaagcttaccagaagtcatcgtcagccttgccgcgtctctgcacgaacaacgcgatttagccgttggtacagccctcggcagtaacattatcaatatattgctgatcctcggtctggctgcgctggttcgtccttttaccgtccattctgatgttctacgccgtgaattacccttaatgttgttggtcagcgtggtggccggttccgtactctatgacggacaacttagtcgcagcgatggtatctttctcctctttctggctgtgctatggctgctgttcattgttaaacttgcacgtcaggctgaacgtcaggggactgacagcctgaccagagagcagcttgcagagctgccgcgtgacggcggattgcccgtcgcgtttttatggctcggcattgcgcttatcatcatgccagtggccacgcggatggtggttgataacgccacggtgctggcgaattactttgccatcagcgagttgacgatgggtctgacggcaattgctatcggaaccagcctgccggaactggcaaccgcaatagcgggggttcgcaaaggtgaaaacgacattgctgtcggaaatatcattggcgcaaacatttttaatattgtcatcgtgttgggtttacccgcgctgataacgccaggagagattgatccactggcgtacagtcgtgactacagcgtgatgttgctggtgagcattatttttgcgttgctgtgctggcggcgctccccgcaaccgggccgtggtgtaggggtattattaactggcggatttatcgtatggctggcgatgttgtactggttaagcccaatactcgttgaataactggaaacgcattatgagccacgtagagttacaaccgggttttgactttcagcaagcaggtaaagaagtcctggcgattgaacgtgaatgcctggcggagcttgatcaatacatcaatcagaatttcacgcttgcctgtgaaaagatgttctggtgtaaagggaaagttgtcgtcatggggatgggaaaaagcgggcatattgggcgaaaaatggcggcaacgtttgccagcaccggtacacctagttttttcgtccatcctggtgaagccgcgcatggtgatttaggcatggttaccccacaggatgtggtgattgctatctctaactctggtgaatccagcgaaatcacggccttaattccagtgcttaagcgtcttcacgtaccgttaatctgcatcaccggtcgcccggagagcagcatggcgcgcgccgcagatgtgcatctgtgtgttaaagtagcgaaagaagcctgtccgttagggctggcaccgaccagcagcaccaccgccacgctggttatgggcgatgccctcgctgtcgcgctgttaaaagcacgcggctttactgctgaagattttgcgctcagtcacccaggcggcgcactgggtcgtaaacttctgctgcgcgtaaacgatattatgcatacgggcgatgagatcccgcatgttaagaaaacggccagtctgcgtgacgcgttgctggaagttacccgcaaaaatcttggtatgactgtcatttgcgatgacaatatgatgattgaaggcatctttaccgacggtgatttacgccgtgtcttcgatatgggcgtggatgttcgtcagttaagtattgccgatgtgatgacgccggggggaatacgtgtgcgccctggcattctggccgttgaggcactgaacttaatgcagtcccgccatatcacctccgtgatggttgccgatggcgaccatttactcggtgtgttacatatgcatgatttactgcgtgcaggcgtagtgtaaagattcaaggataaacaacaatgagcaaagcaggtgcgagccttgcgacctgttacggccctgtcagcgccgacgttatagcaaaagcagagaacattcgtctgctgatcctcgatgtcgatggcgtactgagtgatggcctgatttatatgggcaataatggcgaagagctgaaagcgttcaatgttcgtgacggttatggcattcgttgtgcgctcacctctgatattgaagtcgctatcattaccgggcgaaaggctaaactggtagaagatcgttgtgccacattggggatcactcacttgtatcaggggcagagtaacaaactgatcgcctttagcgatctgctggaaaaactggcgattgccccggaaaatgtggcttatgtcggcgatgatctcatcgactggccggtaatggaaaaagtgggtttaagcgtcgccgtggccgatgcgcatccactgttgatcccgcgcgccgattacgtgacgcgcattgctggcggtcgtggcgcagtgcgcgaagtttgcgacttattactcctggcgcagggcaaactggatgaagccaaagggcaaagcatatgagtaaagccagacgttgggttatcattgtgctaagtctggcggttctggtgatgatcggcattaatatggccgaaaaagacgataccgcccaggtggtcgtcaacaacaatgatcccacctataaaagcgagcatacggacacgctcgtctataacccagaaggggcactaagctatcgattgattgctcaacacgttgaatattattccgatcaggccgttagctggtttacgcagccggtacttaccacgtttgataaggataaaatcccgacatggtccgtaaaagcagataaagccaagctgaccaatgaccggatgctctatttatatggacacgttgaagtcaacgcacttgtgccagactctcaacttcgcagaatcacgacggataacgcgcagatcaatctggtgacgcaggatgttacctctgaagacctcgtcacgttatacggaacaacatttaactccagcggtctgaaaatgcgcggcaacttacgcagcaagaacgccgagctgattgaaaaggttagaacatcctatgaaattcaaaacaaacaaactcagccttaatcttgtgcttgccagcagtcttctggccgccagcattccggcatttgccgtaaccggagacactgatcagccgatccacattgaaagcgaccagcaatctcttgatatgcaaggcaacgtggttacctttaccggtaatgtcatcgtcacccagggcaccatcaaaattaatgccgacaaagtggtcgttacccgtccgggcggcgaacaaggtaaagaagtgattgacggctacggtaaaccggcaacgttctaccagatgcaggacaacggtaaacccgttgaaggtcacgcttcccagatgcactacgaactggcaaaagattttgtcgttctgacgggtaatgcttatctgcagcaggtcgatagcaacattaagggcgataagatcacttacctggtgaaagagcagaaaatgcaggctttcagcgacaaaggcaagcgcgtaacaaccgttctggtgccgagccagctgcaggacaaaaacaacaaaggccagaccccggcacagaagaagggtaattaattcgttatggcaacattaactgcaaagaaccttgcaaaagcctataaaggccgtcgcgtggtagaagacgtcagcctgaccgtcaactccggggaaattgtcggtctgctggggccaaacggtgccggtaagaccaccactttctacatggttgtaggcattgtgccgcgcgatgcgggcaacatcattattgatgatgacgatatcagtctgctgcctctgcatgcacgcgcgcgccgcggtatcggctatctgccacaggaagcctccattttccgtcgcctcagcgtttacgataacctgatggcggtactgcaaattcgtgacgacttgtctgctgaacaacgtgaagaccgcgcgaacgagctgatggaagagtttcacattgagcacctgcgtgacagcatggggcagagtctctccgggggtgaacgtcgccgtgtagaaattgcccgcgcactggctgcgaatccgaaatttattctgctcgacgaaccgtttgccggggttgacccgatcagcgttatcgacattaaacgcatcattgagcacctgcgcgacagcggcctgggcgtgctgatcactgaccacaacgtgcgtgaaacactggcggtttgtgaacgcgcttatatcgtcagtcaggggcatttgatcgcccacggcacgcctacagaaatcttacaagacgaacacgttaagcgtgtataccttggggaagacttcagactctgatagggtagaagtttgcgacgttttagcaggagagtacgattctgaacatgaagcaaggtttgcaactcaggcttagccaacaactggcgatgacgccacagctccaacaggcaattcgtctgttgcagttgagcacgctggaacttcagcaggagctacagcaggcgctggagagtaatccgctgcttgagcaaatcgacactcatgaagaaatcgacacccgcgaaacgcaagacagtgaaacgctggacaccgccgacgcgctcgaacaaaaagagatgccggaagagctgccgctcgatgccagttgggacaccatttacaccgctggtacaccatccggcaccagcggtgactacattgacgacgagctgccggtctaccagggcgaaacgacgcagaccttgcaggattacctgatgtggcaggttgagctgacaccgttttccgacactgaccgcgctattgctacctctatcgtcgatgccgttgatgaaaccggttatctgactgtcccgctggaagatattctcgaaagtataggcgatgaagagatcgacatcgacgaagttgaagccgtccttaagcggatccaacggtttgatccggtcggtgtggcggcaaaagatctgcgtgactgtctgctgatccaactctcccaattcgataagaccacgccgtggctggaagaggccagactgatcattagcgatcatctcgatctgttagccaatcacgacttccgcactttaatgcgcgtcacgcgtctgaaagaagatgtgctgaaagaagccgtcaatctgatccagagcctcgatccgcgccccgggcagagcatccagactggcgaacctgagtatgtcattccagatgtgctggtgcgtaagcataacggtcactggacggtagaactcaacagtgacagcattccgcgtctgcaaatcaaccagcactacgccagcatgtgcaataacgcgcgcaacgatggtgacagccagtttatccgcagcaatctgcaggatgccaaatggttgatcaagagtctggaaagccgtaacgatacgctactgcgcgtgagtcgctgtatcgttgaacagcagcaagccttctttgagcaaggtgaagaatatatgaaaccgatggtactggccgatatcgcccaggctgtcgaaatgcatgaaagcacgatatctcgcgtgaccacgcaaaaatacctgcatagtccacgaggcatttttgaactgaagtatttcttttccagtcacgtcaataccgagggcggcggcgaagcttcctccacggcgattcgtgcgctggtgaagaaattaatcgcggcggaaaacccagcgaaaccgttgagcgacagcaagttaacctctttgctgagcgaacaaggtatcatggtggcacgccgcactgttgcgaagtaccgagagtctttatccattccgccgagtaaccagcgtaaacaactcgtttgacccaaccgataaggaagacactatgcagctcaacattaccggaaataacgtcgagatcaccgaggcactgcgcgaatttgttacagccaaatttgccaaacttgagcaatattttgaccgaatcaaccaggtctatgttgttctgaaagtggagaaagtcacccacaccagtgatgcaacactgcatgtaaacggtggtgaaattcatgccagcgcggaaggtcaggacatgtacgctgccattgatggcttaattgataagctggcacgccagttgaccaaacataaagataaactgaaacaacactaattgtccgggcaattagcatgtgcatggcggtctgttgtgcggcacaacgggccatttgtacggttaatgctccgagcctgttccactgtttgagtgggcaggttcttaggtgaaattatgacaaataatgatacaactctacagcttagcagtgttcttaacagggaatgtacgcgaagccgcgtccactgtcagagcaaaaaacgcgccctggaaatcatcagcgagctggcggcgaaacaacttagcctgccgcctcaggtggtttttgaagctatcctgacgcgggaaaaaatgggcagtaccggtatcggcaatggtattgccattccgcatggcaaactggaagaagatactctgcgcgccgttggcgttttcgttcagctcgaaacgcctatagctttcgatgccatcgacaaccaaccggtggacttactttttgccctgctggtgccggcagaccaaactaaaacgcacctgcatactctgagcctggtggcgaaacgtctggcggacaaaaccatctgccgccgtttacgcgcagcccagagcgatgaagagctgtatcaaatcattacggataccgaaggtactccggatgaagcgtaattattcggtaatgtctcttttagacgttgtgaggagaaacagtacatggtactgatgatcgtcagcggacgtagtggtagtggtaaatctgtcgccctgcgtgcgctggaagatatgggtttttactgcgtggataaccttcccgtagtgttgttacccgatctggctcgaaccctggccgatcgcgagatttctgccgccgtcagcattgatgttcgtaatatgccggagagtccagaaatattcgaacaggcgatgagtaacctgcctgacgctttcagtccgcaactcctgttcctggatgccgaccgtaataccttaattcgtcgttacagtgacacgcgccgactgcatccgctttccagcaaaaacctgagcctggaaagtgctatcgacaaagaaagcgatttgctggagcctctgcgtagccgagcggatctgattgtcgataccagtgaaatgtccgttcacgagctggctgaaatgctgcgtacccgtctgctgggtaaacgtgaacgcgaactgaccatggtctttgagtctttcggcttcaaacacggtatccctatcgatgcagattacgtctttgacgtgcgcttcttgccgaacccgcactgggatccgaaactgcgtccaatgacaggtcttgataaacctgtcgccgcgttcctcgaccgccacacagaagtacacaattttatctaccagacgcgaagctatcttgagctatggttacctatgctggaaaccaacaaccgtagctacttgacggtcgccattggttgtaccggcgggaagcaccgtagcgtgtatattgcagagcaactggcagactacttccgcagccgcggtaaaaacgtccagagtcgccatcgtacgctggaaaaacgtaaaccatgaccgtcaagcaaactgttgaaatcacaaacaagctgggcatgcatgcccggcctgcaatgaagctgtttgaattaatgcagggttttgacgctgaagtgctcttacgtaatgacgaaggcaccgaggctgaagccaacagcgttattgcgctgctgatgttggattctgccaaaggacggcagattgaagttgaagcgaccggtccacaggaagaggaagcactggccgccgttatcgccctctttaattctggttttgatgaagattaatcttcatcactttgacatacaactcccttcaaactccccccgacaataagaaaatcacgtactgaaatcgttctcaatcaacgtcatttgtacattttgtgcgcttttcactttcagaagaaccttaagaaaaccttaagaggcattgtttaggttttgtttaagttaatcgaccatactggagatcgtcagaaaatatttccaggagatggcatgattcgcttatctgaacaaagtcccctgggcaccggaagacatcggaaatgttatgcgcatccggaagatgcccaacgctgtatcaagattgtctaccatcgtggcgatggtggcgataaagagatccgccgtgagttaaagtactacgcgcatcttggtcgccggttaaaagactggagtggaataccgcgctatcacggtaccgttgagacggattgcggaaccggttatgtctacgatgtgattgcagattttgacggcaagccttccattacgctgaccgaatttgctgaacaatgccgttacgaagaagacattgcacaactgcgccagctactgaaacagctgaagcgttatttgcaggataaccgtatcgtgacgatgagcctgaagccgcagaatatcctctgtcaccgcatcagtgagagtgaggttatcccggtcgtctgcgacaacattggtgaaagcacattgattccactggcgacctggagcaagtggtgttgtctgcgtaagcaagagcggttatggaaacgatttatcgcccaaccggcgctggctattgccctgcagaaagatctgcaacctcgtgagagcaaaacgctggccctcactagccgcgaagcttaatccagctggtgttgttgcataaacggctcaccgcctaactgatacatctgccgtaaaatccacgcctgacggctacgcacgtagccgcttgggctggagactttgaaacgaagtggattaggtaatacagctgccagtaatgcagcttcgctccgggtaagtttgctcgcgggtttgtggaaataacgttgtgccgcagcttcgacgccaaacacaccgtcgccaaattcggcgatattcaggtaaaccgtcaggatacgctttttgctccagaccgtttctatccccagcgttaatccggcttccagcccttttcgaacccagctacgcccatcccataaaaagagatttttggctgtctgttgagaaatcgtactagcaccgcgaatacggttttcattgcgctcgttgtgcgccagggctttctcaatggaagcgacatcaaagccccagtgctcaggaaatttctgatcttctgcggcaatcaccgccagtcccatccacgggctgatttgatccatactgacccagtcagaatgtgccacgtaacgaaaattgccatgcagccaggcgctgacctgtcgctcgaccattaccgcactgaagggaacaggcgcaacgctaaacaacgcgatgcccccgccccagaaaacggcgaggacaaccattaaccgcaaaagaaaacggcgaacgaaactaaacaccgttaagcggcttttactcattcagccagaaccagcacgcgggaaaccagcttatcaatgccgctcgccgcttctgcaatgttctgcgccagcatatatgctggggtggtgacaatcttattgtcttcatcaaccacgatatcatcgacaggacacggcacatgctccgcgcccatctcttccagcacttctgcggtatcgatatcagtaccgatggtcaaacgcagcgggaaatcgaaaattttcggcagcatcgccggggcaatacacataaaaccaagcggttttccggcctgatgcatcgcttgtgccagcgcctttaattcacggtcaacggtgcattcgctaccaagactggcaaaattgcttaaattcttcgccgcgccaaacccccccggcacaatcaacgcatccagttcagcggcatcggcctgggccagaggacggatttcaccgcgcgttattcgtgccgcttcaatcagcacattgcgcgtttccgtcatcgcttcgccagttaaatggttgataacatcaacctgctgcttatccggtgcaaagcagaccgcctgcgcaccgctgcgactaatagctaacaacgtcaacaccgcttcatgaatttcagaaccgtcatagacgccgcatccgctcagaattacgccaattttcttcattgtgatcatcctttcgcaattgactgaaacacattaatttttttaataaaaatggtacgcatcacacatttaactgattcatgtaacaaatcatttaagttttgctatcttaactgcgtgcggcctgaaaaacagtgctgtgcccttgtaactcatcataataatttacggcgcagccaagatttccctggtgttggcgcagtattcgcgcaccccggtctagccggggtcattttttagtggcttttgccacccacgctttcagcacttctacgtcgtgacgccactcttctttcatctcttcaatccattcaccgacgttatcttcccaggccggaaggtcaggagactgaatttgctgacccagctgttgcagatggcgtaaccccacactccccgccgcacctttaattttatgtccttcctcaacaatgccttttttatcctgcgccgtcagattgctctccagcacgctgacatagcccggcatcatcttctcaaacaccgctaacccgtcggtgatcagcttcggtcctacaagttcgagatactgttccagcatgggaatatcgagcaatgcttcacttttactgttctcttctgtcgtcaccgtactctcctcatcatcctgggtatcccagaatttcttgatcatcgcggttagcgccggaacagaaagcggcttactcagcacatcatccattccagcattgaggtactcttgtttgtctttcagcacgttagcggttaaggccaccagcggcggtaaatcctcgcgcggataacgtttcgtcagttcacgagagatatccagcccggtcatatctggcaactgaatatccagcaacaccaggtcgtattcgcccggtttaaacatctccagcgccgccttgccggtcatggcgacatcaacgctgttacctaatttttccagcacagaacgcgcaacaatcacgttcagttcaatgtcttccaccagcagcacattcagcgccggtaaaggcatatcgtcttcatcaaacgcatcatcgacctcttctgctacgctcggtgcgtggatcgtcaacgtaaaggtactacctttgccctgttcgctggtaaccgtaatatcgccgcccatatttttcgccagacgacgagaaacggccagaccaataccggtgccggtggcaggtttaccgccatgactgtctttcacctggtaatacatggcgaaaattttatccagctcatcctgcggaatgccgataccagagtcttccacttcaaaatgcagcatatcgccttcatcgtagcgcacgcgcacggtaacctggccttgctgggtgaatttgacggcgttactgatgaggttccacaggatctgccgtaaacgcgtcccgtcggtaatgacctgatgcggtaatggcagcgtcggctccaggttaaagcgcaatcctttttgttgcgcctgcaatgcggagagattttccagatcggcaaggaagctggtgaaatcaaccggttgattatcaagctggaccttgcgccgttccatcttatccatgtcgataatatcgttaaagatattccccagcgtgacggcgctaacatggatggtcttgagatatttttcctgctcggcggtgagttcggtatccagcagaatgcggctcagaccgacgataccgttcagcggtgtacgcaattcgtgactgatggtggagataaacgtcgttttgtcgcggctggcccgttcaagcgcatcctgataccgcttacgctcggtaatgtcgcgaccaaagcccatcaaaccgtgacgtttacccacgcggtcgtagtacggcactttacggatttcaaagcaggctttgcgcccgtccgggtaatccagccactgttcataggtcagactcacattatgacggaacactttttcatcggtttcaatgacttttgcggcggcttccggactgtaaacatcagcaggtttcaggtgaaccagttgtttttcgctttttccggtcagcagctccatcgcgcggttacagccggaaaactctttatcttcgttacgataaaaaaccaggtcgggactagcatcaaggaaggaacgtaagaaactggattgctgctcgagctgaatttgtgtctcttcgcgctctttgatttcaattttcagttggccgaaggtttcctgcagttctgcttccgctttttcacgaacggcaatttcctgatttagctgggcaatattatcttttaactgaacgttgaggctcaaatcgcgctcgcgcatctcctccagtttttgcaccagccgactcagacgttgtcgactctcctccagttgctcgacgaccacgcttagaaagtagaccgcccacggcgtaatcagcaaaccaaagaagatagaacgaataacatcaatgctttcgacctgaccatgcagcaccatggttaccgccatttgtaccacaatggcaagaacgacgagggccagcgccagcaacatactgaagcgcaccagacctaacttcatcatcaggtcaacataatactgcgccagcagacgaatttgcttcattagggaattccttcacgacaacctgccccaataatacccaattctgacagttacgttataaattgtgtgagaaatgcggaattcccctcaacgacttactccgttggaggtagccacggacgtcccagcgcgcttccctgtacgccatgttcattcagatagcgatccagctcgaccattcccgtccatcgattttcgcaccacagcggagcaagcagcgtcgggcgacgggcgctggcggaaatgcggtggtagatcacttccggtggcgtatggcgaatcatttctccggcagtgagcgtgtaatcctccagttcaataccgttcaaacgccccgcttcccaggctttcgccataatgctgcctttcacaatatgcagcggatgcagctttatgccgtccacgccggtttcaaccactcgctccagcgtttgcaaacattcagcctgcccttcgccaggcaggccgacaattaagtgggaacacaccttcagcccgcgctgacgtgccagctgggttgtacgctgataacaggcaaaatcatggccgcggttgatgcgatgcagtgttttgtcgtgggcggtttgtagccccagctccagccacacttcgtaaccctggtccttatattcgcaaagcagatccagcaccgcatccggcacgcagtccgggcgggtacccacacacaaaccgacaatattggcctggctcaccgcctgctgatacatagaacgcagcacctgaacttccgcaaaggtgctggtatacgcctgaaagtaggccagatagcgtttagcgcggttaactaaattcgcctggtgcgccagttgctcggcaatggaacgatgctgctgcgcttcatcggcaaagctggcaacattacagaatgtgcagccaccacgcccgatggtaccgtcacggttagggcagctaaaaccgccgtgcagcgtcagcttatgcaccttttgcccataacgacgggtgagatcaccaccaaacatattgactaatttctgtaactgcataatctgatagaccgcgccttgaaaagaggccaaagcctgccatttttagctcaattcggcgatgacctggatcaatcgtcccggcctgcttttatcaactgcataatcaatcaaaattaccgaaatttcatgcataatcacataaatcacttttgcttatcttgtgtcagatttttttatctcctgatggattttaggcaaaaacagtagcatgaaacgtcattaccaattaaggcagtataaaatgctggttttgtcgtcagttcaaggcaggataagggttaacacacctttatgacagtcaggaattgactgtttctctaacgacttcccttttagccttaaagataaaatccattttaatttcagtcatttaataaagaattttgcgctaaagcacatttctgtaccaataagcttgccatttgacctgtatcagctttcccgataagttggaaatccgctggaagctttctggatgagcagcctgctcatcatatttatgcagtaattgagatcccctcttcaccgtattaaccgatgcgaaaaggacaacaagggggcgaatgcgaggcgcgcgtatgacacgcaaaccccgtcgccacgctctttctgtgcccgtgcgcagcggtagcgaagtggggttcccgcagagcctgggggaggttcacgatatgttgtacgataaatcccttgagagggataactgtggtttcggcctgatcgcccacatagaaggcgaacctagccacaaggtagtgcgtactgcaatacacgcactggcccgcatgcagcaccgtggcgcgattctcgccgatggtaaaaccggcgacggttgcggcttgctgttacaaaaaccggatcgcttttttcgcatcgttgcgcaggagcgcggctggcgtttagcaaaaaactacgctgtcgggatgctcttcctgaataaagatcctgaactcgccgctgccgcacgccgcatcgttgaagaagaactgcaacgcgaaaccttgagcattgtgggctggcgtgatgtccccactaacgaaggcgtgctgggtgaaatcgccctctcctctctgccacgcattgagcaaatttttgtgaacgccccggcaggctggcgtccacgcgatatggagcgccgtctgtttatcgcccgccgccgcattgaaaagcgtctcgaagccgacaaagacttctacgtctgtagcctgagcaatctggtgaacatctataaaggtctgtgtatgccgacggatctgccgcgcttttatctggatcttgcggacctgcgtctggaaagcgccatttgcctgttccaccagcgcttctccactaacaccgtaccgcgctggccgctggcgcaaccgttccgctatctggcgcataacggtgaaatcaacaccatcaccggtaaccgccaatgggcgcgtgcgcgtacttataaattccagacaccgcttatccctgacctgcacgacgccgcaccgttcgtcaacgaaaccggctctgactccagtagcatggataacatgctggaactgctgctggcaggcgggatggatatcatccgcgccatgcgtctattagtaccacccgcctggcagaacaacccggatatggacccggaactgcgtgccttctttgactttaactccatgcatatggagccgtgggatggcccggcgggcatcgtgatgtccgacggtcgttttgccgcctgtaacctcgaccgtaacggtctgcgtccggcgcgctacgtcatcaccaaagataagctcatcacctgcgcctctgaagtcggtatctgggattaccagcctgacgaagtggtcgaaaaaggccgcgtcgggccaggcgaactgatggttatcgacacccgcagtgggcgtattctgcacagcgcagaaaccgatgacgatctgaaaagccgccatccatataaagagtggatggagaaaaacgtccgccgactggtaccgtttgaagatctgcccgatgaagaagtgggtagccgcgaactggacgacgacacgcttgccagctaccagaaacagtttaactacagcgcggaagagctggactccgtaattcgcgtactgggcgaaaacggtcaggaagcggtcggtagcatgggcgatgataccccattcgccgtgctctccagtcagccgcgcattatttacgactacttccgccagcagtttgcccaggtgactaacccgccaatcgacccgctgcgtgaagcgcatgttatgagcctcgccaccagtatcggtcgtgaaatgaacgtcttttgcgaagcagagggccaggcgcaccgtttaagctttaaaagcccgattctgctctactccgatttcaaacagctcacgacgatgaaagaggagcactaccgcgcagatacgctggatatcacctttgacgtcactaaaaccacgctcgaagcgacagtcaaagagctgtgcgacaaagccgaaaaaatggtacgtagcggcaccgtgctgctggtgctctccgaccggaatatcgctaaagatcgcctgccggttccagccccgatggcggttggcgcgatccagacccgtctggtcgatcaaagcctgcgttgcgatgccaacatcatcgtcgaaaccgccagcgcccgcgatccgcaccacttcgccgtgttgctgggcttcggcgcgacggctatttatccataccttgcctatgaaacgctgggccgcctggtagacacccatgcgattgccaaagattatcgtaccgtgatgctcaactaccgtaacggcatcaacaaaggcttgtacaaaatcatgtccaaaatgggcatctccaccatcgcctcttaccgctgcagcaaactgtttgaagcggtcggtctacacgatgatgtagtgggcctgtgcttccagggggcggtcagccgcattggtggagcaagctttgaagacttccagcaggatctgctgaatctgagcaaacgtgcctggctggcgcgtaagcccatcagccagggcggtctgctgaaatacgtccacggcggcgaataccacgcctacaacccggacgtggtgcgcacgctgcaacaagcggtacaaagcggcgagtacagcgactatcaggaatacgcgaagctggttaatgagcgtccggcaaccacgctgcgcgatctgctggcaattacgccgggtgaaaacgcggtcaacattgctgatgttgaaccggcaagcgaactgtttaaacgctttgataccgccgcgatgtctatcggcgcgttaagcccggaagcccacgaggcgctggcggaagcgatgaacagcatcggcggtaatagcaactccggtgaaggcggcgaagacccggcgcgctacggcaccaacaaagtgagccgcatcaagcaggtggcttccggtcgctttggggttactccggcgtatctggtcaatgccgacgtcattcagattaaagtcgcccagggcgcgaagccaggcgaaggcggtcagttgccgggtgataaagtcacgccttacatcgccaaactgcgctatagcgtgcccggagtgacgctgatctccccgccgccgcaccacgatatctactctatcgaggacttagcgcagctcattttcgacctcaagcaggttaacccgaaagcgatgatctccgtgaagctggtttccgaaccgggagtaggcaccatcgcgactggcgtggcaaaagcttatgcggacttgatcaccatcgcaggctatgacggcggcaccggcgcaagtccgcttagtagcgtgaaatacgcaggctgtccgtgggagctggggcttgttgaaacccagcaggcgctggttgctaacggcttgcgtcacaagatccgtttgcaggtcgatggcggcctgaaaacgggtgtcgatatcatcaaggcggcgattctcggcgcagaaagcttcggcttcggcactggcccgatggtggcgctcggctgtaaatatctacgtatttgccatctgaacaactgcgcaacgggtgtagcaactcaggatgacaaactgcgtaagaaccactatcacggcctgccattcaaggtgacgaattactttgagtttatcgcccgtgaaacccgcgagctgatggcacagcttggcgtaacacgtctggtggatctgattggtcgcaccgacctgctgaaagagctggacggtttcaccgccaaacagcagaagctggcgctgagcaagctgctggagactgccgaaccgcatccaggtaaggcactctactgcaccgaaaacaacccgccgtttgataacggcctgctgaacgcgcagttgctgcaacaggcgaaaccgtttgtcgatgagcgccagagcaaaaccttctggttcgatattcgcaacaccgaccgttctgtcggcgcgagccttagtggctatatcgcccagacgcacggcgatcaggggctggcagccgatcctatcaaagcgtacttcaacggcaccgcaggccagagcttcggcgtgtggaacgcgggcggcgtggaactgtacctgaccggtgatgccaacgactatgtcggtaaaggcatggcgggcggcttaatcgccattcgtcctccggttggttccgccttccgcagccatgaagcaagcattatcggcaacacctgcctgtatggcgcgaccggtggtcgtctgtatgccgcaggccgcgcgggtgaacgtttcggcgtgcgtaactccggtgctatcaccgtggtagaaggcattggcgacaacggttgtgaatatatgacgggtggtatcgtctgcattctgggtaaaaccggcgttaacttcggtgcgggcatgaccggcggtttcgcttacgttctcgatgaaagcggcgatttccgcaaacgcgttaacccggaactggtcgaggtcttaagcgttgacgctctggcgatccatgaagagcatctgcgtggtcttatcaccgagcatgtgcagcataccggctctcagcgcggtgaagagattctggcgaactggagtaccttcgccactaaatttgcgctggttaaaccgaagtccagtgatgtaaaagcactgctgggtcaccgtagtcgtagcgcagctgagttgcgcgtgcaggcgcagtaaggggtagcaacaatgagtcagaatgtttatcaatttatcgacctgcagcgcgttgatccgccaaagaaaccgctgaagatccgcaaaattgagtttgttgaaatttacgagccgttttccgaaggccaggccaaagcgcaggctgaccgctgcctgagctgcggcaacccatactgcgagtggaaatgcccggtacacaactacatcccgaactggctgaagctcgccaacgaggggcgtatttttgaagcggcggaactgagccaccagaccaacaccctgccggaagtttgcggacgagtctgcccgcaagaccgtctgtgcgaaggttcctgcactctgaacgatgagtttggcgcggtgaccatcggcaacattgagcgctatatcaacgataaagcgttcgagatgggctggcgtccggatatgtctggtgtgaaacagaccggtaaaaaagtggcgattatcggcgcaggcccggcaggtctggcgtgtgcggatgtcctgacgcgtaacggcgtaaaagccgttgtcttcgaccgtcatccagaaattggcgggctgctgaccttcggtattccggccttcaagctggaaaaagaggtaatgacgcgtcgccgtgaaatcttcaccggcatgggtattgaattcaaactcaataccgaagtgggccgcgacgtacagctggacgatctgctgagtgattacgatgccgtgttccttggcgtcgggacttatcagagtatgcgcggcgggctggaaaacgaagacgccgatggcgtgtacgcagcgctgccgttcctcatcgccaacaccaaacagttaatgggctttggtgaaacccgcgacgaaccgttcgtcagcatggaaggcaaacgcgtggtggtccttggcggtggcgacactgcgatggactgcgtgcgtacgtccgtgcgccagggagcgaagcacgttacctgtgcctatcgtcgtgatgaagagaacatgccgggttcccgccgcgaagtgaaaaacgcgcgggaagaaggcgtagagttcaaattcaacgtccagccgctgggtattgaagtgaacggtaacggcaaagtcagcggcgtaaaaatggtgcgtaccgaaatgggcgaaccggacgccaaaggccgtcgccgcgcggagatcgttgcaggttccgaacatatcgttccggcagatgcggtgatcatggcgtttggtttccgtccacacaacatggaatggctggcaaaacacagcgtcgagctggatagtcaaggccgcatcatcgccccggaaggcagcgacaacgccttccagaccagcaacccgaaaatctttgctggcggcgatatcgtccgtggttccgatctggtggtgaccgctattgccgaaggtcgtaaggcggcagacggtattatgaactggctggaagtttaagcgaggtaacaatgaattcgccagactgtgtctggcgaatcaaattactgacgaagtgcgcgttgttttctggcaaatgcggcatgagcgtttgacctttcctataatagggataattttcaataaattgtgctttgttcaccaagtctgatgagtgaagcacatcaagcaatttctcatttacaatccgtctcaattacttgttaacacctctgacaataccgattctgcaagctattcagtcttttcattccatgtaaattgtctcgatattaatatacaaaatatgaatataaaaaaccaatatattatccttaattatctatatattttcctatttttcagcgcaaacattcatgtaatgaataattatcaccacaaaccacctcaccagcaccttattattcacatgatcgtaactataaaattcattaaataaatacatcccagcaagttggctatttctgaacgagttatttatttacattcacaaacagatatatatactgcttcagctttttattttaaaaaataaatttgttattaaggatatgttcatatgtttttcaaaaagaacctcacaacagctgctatttgtgcagcactttctgttgcagcattcagtgccatggcaacagatagtactgatacagaattaactatcatcggcgagtatacccctggtgcatgtaccccagttgttacgggcggcggcattgttgactatgggaaacatcataacagtgcgctgaatccgaccggtaaaagtaataaactggttcaactgggccgcaaaaacagcacattaaatataacctgcacagcaccaacgctaattgctgtaacctccaaggataaccgtcagagcaccattgtagcgttaaacgacacatcctatattgaaaaagcttatgatactctcgtagatatgaagggaacgaaaaacgcctttggtttaggttctgcgcctaatggacaaaaaattggcgctgcatccattggtattgacaggtctaatggtgggattcacgcggcggacgatacaggtgaaattcctgtcgacctgattcaaactgaccactggagtgcagcgacccccacatggaaagccagttctaatggcgcattctgcagcctgacaagttgcagtgcaatcgagcgcggttattctgttgcaaaaacaggggaactgacacctgttgctattacagcggtcaccttcccgttactgattgatgctgcggtaaatgacaatactattcttggttctgatgaaacgatcaaactggatggtaacgtcactatcagcgttcagtatttataagaacttgtaatacagtttttatttttacgcattaaccagttagctataactcggacagattatgccctatgacatggtctgtcttaatcaatctcatcgcaaacagtgcataacatatattaacaatatgtttctgcgttatttatcattattacaggagttttaatttaaatgctcagacacattacattcactgtatttataacaacatcaatgaatactaacaatgccggacaggagtactatcaggcattcgttttatacgatcggttaatgtttcaggaaagctcttcgcatatcttggggaaagtaaatgtaatacgctgttcttaattgttcagtgctcaccccccagagtatagctcattccattattcaacttagctccatataaagggacagataatggaaagcctcagtgaaggaaccacagcaggctaccagcaaatccacgacggtattattcatctggtcgatagcgcccggacggaaacggtacgtagcgttaacgcgttaatgaccgcgacgtaccaggaaattggccgacgaattgtcgaatttgaacaaggtggcgaggccagggctgcgtatggtgcgcagctaatcaagcgactaagtaaggatttatgtctaaggtataagcgtgggttctctgcaaaaaacttacgccaaatgaggcttttttacctcttttttcaacatgttgaaattcaccagacaatgtctggcgaattaacaccattgggaattccgcagacaccgtctgcagaattcccaagcgcaaagatttggcagacgctgtctgccaaatctttccccttgcccaggtccacctacgtccgtttactttccgttaaaaacgctgacgcccgcagcttttatgaaaaagagacgctccgctgtggctggtctgttcgccagctagagcggcaaattgcgacccagttttatgagcggacactactgagtcatgacaaaagtgccatgctgcaacaacacgctcctgccgagacgcatattcttccgcaacaggcgatacgcgatccctttgtgctcgaatttctggaattgaaagatgaatatagtgaatccgattttgaggaggcgctgatcaaccacctgatggatttcatgctggaacttggggatgattttgcctttgttggtcggcagcgaaggttacgcattgatgacaactggtttcgtgtcgatctgctgtttttccaccgccgtttacgctgcctgctaatcgtcgatctaaaagtgggcaaattcagctatagcgatgccggacagatgaatatgtatctcaactacgccaaagagcactggacgctaccggatgaaaatccgcccatcggtctggttctctgtgcagagaaaggagccggagaagcgcattatgctctggcaggtttgcctaacaccgttctggcaagcgaatataagatgcaactacctgatgagaaacgactcgcagatgaactcgttcgaacacaggcggtgctagaggaaggctatagacgccgttaatttcagcggtttcgaattctgcagacagtgtctgcagaatctttaaaacgaactaagttttaagccattaaatcagccttaaccttcaccacaacctttttaatctctccaggctcgccgacaacgcatcctggtttatgcggttcacctggcataaacacggcgaacattcccggttttaagatgatggcttgctcgttatcaatggtgctgcaaagctgataatcatcctcatggtggaactcttcacactgacgcgcagtgcctgccatgccaaacagaatccgttcctcaccgtttaataacagctggatatcaatgtattgctcgtgcaattccgcttttttctcgacggggctttgagtgttaaacgtcatgacattcataaagatattgtcgccctgtaattcgtaacgacccggcgctttttcttgcggtctggcagctaatgccagcgttaacgcgtcctgtaacgcaggatgtaacccagcagacggtaaactctgtacttcacccatcatcataatttttctccctgggccaacagcgcagccccaagtaaacctgcatcatggcggtaatgcgccgccagtaaatcaacatgaaatgccgctggctcctgcgccagatacgtttccaccagcgccagatacccttctgccagaccaacgctgccaccgaccaccacgcactggcaatcagttgtggctttaatatcagcgatcagccttgcaagcgtacgtgcggagcggtgaatcagctgctgcgcctgctcgtcaccctgcccggcgcgcgtgaaaatagttttcgcatccgcgccagccaactccccctgcgctgccgctgcaatgccgcgaccagaagcaatcgcttccacgcaacctgtgcgtccacagccgcagactgggccgtgtggatcggcaagcgtatgcccgatatgccccgccagaccgccagggccggtaagcagtttgcagccgctcactacaccgccgccaacgccggtggaaacggtgataaagaccatatcggttatatcgccatccagcgcctgaaactccgcccatgctgcggcctgcgcgtcgttaatggcaatggtcggcaaattggtaagttgttccagcgttttgactaacggaaagtgtagcaatccaccaagattatgcggattaagcgccagcaagctgccgtcacggattatcccggtgctagcgatggcaacccgctgcgcatgagcttgcaacggagagactaatgcggataaggcatcacgcaaggcttctggtgtctggctggctggcgtaggaagttcacgacgatcgcggatctgcccgtcagcgccaatcagcgcggcggcaagtttagtaccgccgatatcaatcgccagtgtggtcatagcaccgcctttttcatcgctgtgttgtaccactgacaaatgtgctcaagacgcgtgattgcagaaccgaccgtcaccgcccacgcgccgtggcgcatcgcatccgccgcctgagcaggcgtgttgtaacgcccttcggcaatcacccgacatccggcgtcgctcaacgttttcaccagcgccagatccggctcttctggcgtttcaggcgtggtatagccagaaagcgtagtgccaataatttcggctcccagcttttggcatgccaggccgtcttccggcgtactgcagtcggtcatcgccagtaaaccgtgatggtgaatacgtgccagcagcgtttcaacaggcaccggacgcgggcggtcggtgccgtcaatggcgataatgtccgcgcccgcctgcgccagcgcatcaacatcttcaatataggccgtgatgcgtaccggagaatcctccagatcgcgtttcacaattccaataatcggcacgctcaccaccgcacgcgtggcttgcagatttgccacaccttcaatgcgaatggcaaccgcgcccgcctgttctgccgctaatgccatggcggcgacgatttcgggtttatcgagcgggctgtccggaaccggctggcaggagacaatcaggccaccgttagcagcgattttttgatccagttgtgcaagtaagctcatacatcttcccttagcgaaaggcccggtacatagaccgggcaacaggattaacttttggttttgactaaatcgtttttggcgctgccaaacggcacggcaccgctgaatggtttaccgtcgatagcgtcatgagtacgcaacgcttccgggcgcaaccaacgctgaacgcgagaaggcatatccagcccaatcagcaggatcaccacgaacgtcagactgaagctgaggcttgccagcgcagtacccagatccagacgttgagcgatcaacgcgccgatgattggggccagtgcaccgcccaatgcgccaacgttgtaggtaaagcccaggcccgctgcacgctggtcggtatcgaaataaccgccaatcagttttggtaagatcccggcgatcccttgtccaagcatttgctggaagaacagtaacagaccgagcacccagacgtttgcgccgccaatcgcaaataccggaataatcagcagctggctggccagcaggctacaaacgtacgctttgcgggttcccagccagtcaccgaggaagccacctacgcagcatcccaccgccgcgccaaagccactaaagaacagcacattggctacagtatgcgggttataagccagatcggttttcagatacgttggcagcagcgcctgaatcggccaactgtagaggaaagcaaacaacacgaccaccatcagcattacgcccgttggccagcgtttgcctgcactctgcaccataaagctgataaagattgcggcgcataacagcccaagaacagcgacgatcgcggcattttgcaggttaccggcgaagcagaaccacagcgcagtagccgccgccagtgtcattacgatattggcaatgcgatgttcaccacggtagagaatatccaccattgtgcgtactggtgctttacctgcgtgtttctctttccagtcttccgcttccgggatgtttttacgcagccagagagcaaagatgattggcaaaatgccgataaagaacagcgcacgccagccccagaccggaaccaccaggctatagacctgagcggcaacgacggcccccacagagaagccactaatcaaaaaaccactggctttgttacgcagatgttttggccagctttcaatgacataggtggcgctggaaccgtattcacccgccatccccatgccgatgaccagacgagcgataaacatggtgatgtagcctggcgcaaagccgcaggccagcgtcccggcgctgaagagaacgatgctggtgaccattgccagacgacgcccgtagcggtcacccatagcgccgagcatcaggccgccgaaccagcgagagataaaggctgcagagatcagacttgccgcctgcaccgtcgtcagcccgaattcaccttgtacttcggtgagtaccagggcgattaaaacgaaatcaaaaccgtcaagcagatatcccaaccaggcagcggaaaatgcgcgccattgtgcacggttgagatggcgataccacgggatattctgggttgtagtactcattgtgagtctcccgcggtgggcgatgcccacacgctttggtatgaaaattgtagggtacagatgcgtttatttcccctcacccggtaggggcgagcgaggggaaacaactcacccgcgctcttgcatcaactgctgggccagcgccttcagttctggcagatatttttcatctaccggtccaaacggtttgcggcacagcggcacagaaacgacatccatataatggaggacagttttcaggccgcggaatacgcccgttttgatcagtaaatcaatgactttattgcattcagtttgcagtttctgcgcggtctggatatcgccttctttcagcgccttaacgatcccctgatagcgccagcccatgatgttgtaggtactgccgataccaccatcagcgcccgccagcagaccagaggcgaagatttcgtcgtaaccgttatagagcacaagatcaggatgttcacgacggatctgctccatctgatagagatcgccagaggtctgtttcagcgcacctacgccaggcaatgtaacaagtgtgttgatctgatccagggtcagttttaccccactcagggctggaatgttgtacaccaccatcggcaaaccatccgcgctatcaataattgcccgatagtgatcgcagtgttcttcaaagctgaaaggatagtagaacggcgtgacggcggagacggcatcgaagccataacgtttagcgcttgccgcaagttgttggctttcggcggtgctgacgcaaccgacgtgggcgatgagtttaatcttacctttcgcctcttcggcgacgatttccagtacctgttcacgctcggaaaggctttgtacaaaggcctcgccggtgctaccacccacgtataaaccgtcgatgccctgctgaatattgaactgaaccaggcgacgcagactcgctttatccagtgcttgttgttggtcaaaaggagtcaggagtgcagccattacgccacgtaaattcgttgccataaatacctctgaagtgatgcttgtctgataaacgatatacctttatacctgttataccagatcaattaagcaacaccccatacagaaagcttataatgcgatctgcttcactaaagtggcattatttctttttgttggtggtctgaccgaaagcgtgccaggtagcagagacgctgttgagatggctttgcaacgcacgatcggcttcgtcaggatcatgacggcggatcgcatcaacgatcgcaatatgctgttgataactaacgttgttatgttcgtgcagtgcctgatcggtaaccgttgggcgtgcggcaataagccagtcgagcagggcaacgtggatcgccatgaagattgggttaccggggatctccgccagcacgcggtggaaatcaacgtcactacgaatgaatgccgcgttgttatccaggctctgactgttgatttccagtgcttttgccagcaaatcgatttgctcatcggtggcatgttcagccgcatagcgcaccagactggattcaaagaacagacgtaattgttcgaaatgggcaatcccaccgggatgagaaaggaaatctttcgccatgccggaaagctcaccgatgatagtgtccgcagaaggacggctgacgcgagcgcgttcgccgttgtttatttgcaccagacctttgcgttttaacgctgccagcgcttcacgcacgctaggacgcccgacgttaaagaacgccatcagttcgcgttcagacggtaattgttcaccttcgccaaattcacgacggcggatcatctgttccagctcttcttccaccatttcggagagttttttacgcgccagcgggcggctacgcaagttgcgaccaattgcaggactagaatcttcggtttggctatcaaatgcgttcataaggcccattctgtaaggtcagtgtgattaacatcatcagtgacatcctatcacaggattgaaagtaggggaaaatggcagggttttctctttgtgcctcatcattaccataattaacggaataattaactattgcgaaaaattaatgtaacgcagataaaaacatcccgtttgaattatttataagactattcacgagcattatgaatattatgaatgtgttcttacaaaataatcataagcgcatattttttaatgaaaaatcacctcacctacaattaaaaacacgacatccgcaccataaatagccttgcaaaaaatataacatcgttgttttcaatctgccgtttatgggattgaccgttttcttttgacacggagttcaacaatgttcggcataattatatctgtcatcgtattaattacgatgggctatttgatcctgaaaaactacaaacctcaggtggtgctggctgccgcaggtatcttcctgatgatgtgcggtgtctggttagggttcggtggtgtactcgatcccaccaaaagcagcggctacttgatcgtcgatatttataatgaaatcctgcgcatgctgtccaaccgcattgccggattggggctgagcattatggcggtgggcggttatgcccgctacatggagcgcataggggccagtcgcgcgatggtgagcttgttaagccgcccgttaaaactcattcgcagcccgtatattattctgagcgcaacttacgtcatcggccaaatcatggcgcagtttattaccagcgcctccggtctgggtatgttgctgatggtcaccttatttccgacgctggtgagtctgggagtaagtcgtctctctgcggtggcagttatcgcaaccacgatgtccattgagtgggggattctggaaacgaactccatttttgctgcccaggtagcgggaatgaaaattgccacatacttcttccactaccagcttccggtcgcctcttgcgtcattatcagcgtggcgatctcccactttttcgtgcaacgcgcttttgacaaaaaagataaaaatatcaatcacgaacaggcagagcaaaaagctctcgataatgtcccgccgctctattacgccattttacctgtgatgccgttaatcctgatgctcggcagcctgttcctcgcccacgtcgggctgatgcagagtgaactgcatctggtggtggtgatgttactgagtttgactgtgacgatgtttgttgagttcttccgcaagcataacttgcgcgaaacaatggacgatgtgcaggcgttttttgacggcatgggtacgcagtttgccaacgtggtaacgctggtggtcgcgggtgaaatatttgcgaaaggcttaacgacgattggcactgtcgatgcggttatcaggggggcggagcattctggtctgggcggtattggcgtgatgattattatggcgctggtcattgccatttgtgccattgtgatgggctctggcaatgcgccgtttatgagttttgccagtcttattccgaatatcgcagccggactacatgtaccagcggttgtaatgattatgccgatgcattttgccacgacgctagcgcgcgcggttagcccgattactgcggtggtggtcgttacgagtggaattgcaggcgttagcccttttgcggtggtgaagcggacagcgatccccatggcagtcggtttcgtggtgaatatgattgccacaatcacgctattttattaagtcattaaaaagacaaaacaggccgcctgggcctgttttgtattacttcacaacgcgtaatgccggtcgaccaccgcgtggtggctgcggaggttcatcgtcaggatgagtgtcatcatcgtgatctggcttgtcgccatcaataacgctcataacggtttcgttgtctgcgcttgcctcttcatcattcatgatgctggtatcttcatcgtaggcagcttcaggctcaaacatcgtgcctgcgccattttcacgggcgtagatagccagcacggcagccagcggcacagaaacctgacgcggaatgccaccaaagcgcgcgttaaagcgcacctcatcattcgccagttccagattgccgacagcacgcggcgcaatgttgagtacgatttgcccgtcacgcgcatattccataggaacctgcacgccagggagcgtcacatccaccaccaggtgcggcgtgagctggttatccagcaaccactcatagaatgcacgcagcagatagggacgacgtggtgttagctgactcaaatccatacagattaactccggcccagacgcatttcacgttctgcttcagttaaagaagcaaggaaagagtcacgctcaaagacgcgggtcatatagcctttcagctctttcgcacccgggccgctgaactcgatgcccagttgcggcagacgccacagcagcggagcaagatagcaatcgaccaggctgaactcatcgctcaggaagtacggcttctgaccgaagaccggcgcaatcgccagcagttcttcgcgcagttgcttacgtgcggcatctgcttcagaagcactaccgttgatgatggtgttcatcagcgtgtaccagtctttttcgatgcgatgcatgtacagacggctttcaccgcgagctaccgggtaaacaggcatcagtggcggatgcgggaaacgctcatccagatattccataatgatgcgagattcccacagggtcagctcacgatccaccagggtcggaacgctctgattcgggttgaggtcaatcagatcctgaggcggattgtccttttccacgtgttcgatctcgaaacttacacctttctcagccagcacaatgcggacctgatggctatagatgtcagtaggaccggaaaacagcgtcattacgctacgtttgttggcagcgacagccatgaaaacctccaggtatagtcagaatttttactgctaccagccaccaggtggccagtcagaagttgtgttacccaataaggaacgactctctttgttcgaaaatcaaacaaaaaatgagcaatacccgacatttgggcagaaaattggatgatagtttaccagattttgcgaccattgtggtgagtcgatgccggaaatggggaaaaagagatgcgctttagtctgaaatagttgacttagtcccttattggcgatgtggtttttgttttacctgtctgtcaggtggcagcaaaaagcaactttccagtttttacgctgattcagattttagctataaaaaaacccgccgaagcgggttttttcgaaaattgttttctgccggagcagaagccaattaacgtttggagaactgcggacgacgacgtgctttacgcagaccgactttcttacgttcaacctgacgagcgtcacgagtaacgaagccagctttacgcagttcagaacgcagggactcgtcgtattccatcagagcgcgggtgataccgtgacggatcgcaccagcctgaccagagataccaccacctttaacggtgatgtacaggtccagtttctcaaccatgtcgaccagttccagcggctgacgaactaccatgcgggcagtttcacgaccgaagtactgttccagagaacgttggttgattacgattttaccgttgcccggtttgatgaaaacgcgagctgcggaacttttgcggcgaccagtgccgtagtattgattttcagccattgcctataatcccgattagatgtcaagaacttgcggttgctgtgccgcgtggttgtgctcgttacccgcgtaaactttcagtttacggaacatagcacgacccagcgggccttttggcaacatgcctttaaccgcgatttcaatcacacgctcaggacggcgagcaatcatctcttcaaaggtcgcttgtttgataccaccgatgtggccggtgtggtgatagtacactttgtcagtacgcttgttgccggttacagcaactttgtcagcgttcagaacgatgatgtaatcaccggtatctacgtgcggagtgtattccgctttgtgcttaccgcgcaggcgacgagccagttcagtagccagacggcccagagttttaccggtcgcgtcaacaacataccagtcgcgttttacggtttctggtttagctgtaaaagttttcattaaaagcttacccaataaatagttacacgttggtgaacacccaaacgtcttcaattgttgaggttcacacgacaaagtccggcaaacctaccccttcgaatagcctatgccagcacacaaaaagttttgggaaaaaaactttcttgtaacgtggggtcgcaggattatagagaagtcggggtcaaagatcgacccctttttgtgatttgtgacaggttttaacccgccaaatgctcgcgcttcagatactcttcgctttgcatctcttgcagacgactcaggcaacgctggaactcaaacttcagccgatcgccctgataaatttcatacagcggcacttctgcactcaccactaatttgacatggcgctcgtaaaactcatccaccagcgcaataaagcgccgcgcttcgctctccatcaaccgcgtcataactggtacatcaaacaacatgaccgtatgaaagagacgactgagcgcaatatagtcatgctgactgcgggcgtcgacgcacagcgtagtaaaagagaccgccagcgtctggttctcgacgcccattgttgctaatggccgatggttgatttctaacgtcggactattttctcgtttcccccccgccagcgccaaccatagtttatccatttgcgcccgggtttcatcgtgaagtgggctaagccacagatgcgcctgagtgagtgtacgcagacgataatcaacaccagcgtccacgttcattacatcacaatgctgtttaatggcatcgattgcaggcagaaaacgcgcacgttgcaggccatttcgataaagttcatccggcggaatattactcgtcgctaccagggtaataccgcgagcgaacagggctttcatcagaccgccaagtagcatggcatcggtaatatcagaaacaaaaaattcgtcaaaacagagcacgtcagtttcggctttaaagcgatcggcaataatttccagcggatcggtctgcccctgtaaggcagttagctcttcatgcacccgcagcataaaacggtgaaagtgcaggcgctgtttccgctctcccggcaggctttgatagaaaaggtccatcagccaggttttcccgcgtcctacaccgccccacatatataagccacgcactggcgtatgctttgtgtcttcgcgtttaccccacagcttaccgacccgcgccattagcccactcgtcctgggggctggtggcgtgctattgatgagttcctgataaataatttccaggcggctgacggcctctttttgaacgtcgtcgggttgatggctgccttcattaagcgccttcaggtattggcttgttggggtaacgctttgcatgatcttattgttattccttgaataatcggtgcgccgttgttcacggttgacgaaaaaaaggccgttctacactacgcgatatgcagtcgggattccacttctgtggaattaacggttatagtggcataatcagccgcaggcatggagcctgaagccaacaccctacggaaacaaaagacaacgggagatgttcatgacctgggaatatgcgctaattgggttagtcgtcggcatcattattggtgctgtggccatgcgttttggtaatcgtaaactacgccagcaacaggcgttgcagtacgaactggaaaagaataaagctgaactggacgagtatcgcgaagagctggttagccactttgcccgcagcgcggaattactggataccatggcgcacgactatcgccagctgtatcagcacatggcaaaaagctccagcagcctgctgccggaactgtctgctgaagcaaacccgttccgtaatcgtctggcagagtctgaagccagcaacgatcaggcaccggtgcagatgcctcgcgactattctgaaggcgcatccggcctgctgcgtactggcgcgaagcgcgactaatttatttttcgggcgcagccattgcgccctcctcttctctccctccccgactatcatttaatctggtgtctcattgttagccgtctgaaaattcaataacatcaaactgttttgaatctcttttcttatcattcaggtacgagagcaggaataatgaaaaaacaaacccagctgttgagtgcattagcgttaagtgtcgggttaactctcagcgcgagttttcaggccgtcgcgagcattccaggccaggttgccgatcaggcccctctccccagtctggctccaatgctggaaaaagtgcttccggcagtggtgagcgtacgggtggaaggaacggccagtcagggacagaaaatcccggaagaattcaaaaagttttttggtgatgatttaccggatcaacctgcacaacccttcgaaggtttaggctccggtgtcatcatcaacgccagtaaaggctatgtgctgaccaacaaccatgtgattaatcaggcacagaaaatcagtattcagctcaatgatgggcgcgagtttgatgcaaaactgattggtagcgatgaccagagcgatatcgccctgttacaaattcaaaacccgagcaaattaacgcaaatcgctattgccgactccgataaattgcgcgtcggtgattttgccgtagcggtcggtaacccatttggccttgggcaaaccgccacctctggcattgtttccgcattaggccgcagcgggttgaatcttgaaggtctggaaaactttatccagacagatgcttccattaaccgcggtaactccggcggtgcactattaaaccttaacggtgagttaattggcatcaacactgcaatccttgcgcctggcggcgggagcgtcgggattggatttgccatccccagtaatatggcgcgaacactggcgcagcagcttatcgactttggtgaaatcaaacgcggtttgttaggcatcaaaggcaccgagatgagtgccgatatcgccaaagccttcaaccttgacgtgcagcgtggcgcgtttgtcagcgaagtgttgccaggttctggcagcgcaaaagcgggcgtcaaagcgggcgatattattaccagcctcaacggcaaaccgctgaatagctttgctgagttgcgctctcgtatcgcgaccaccgagccgggcacgaaagtgaagcttggcctgctgcgtaacggcaaaccactggaagtagaagtgacgctcgataccagcacctctagcagcgccagcgctgaaatgatcacgccagcgctggaaggtgcaacgttgagcgatggtcagctaaaagatggcggcaaaggtattaaaatcgatgaagttgtcaaaggaagcccagctgctcaggctggcttgcaaaaagacgatgtgatcattggcgtcaaccgcgatcgggtgaacagcattgctgaaatgcgtaaagtgctggcggcaaaaccggccatcatcgccctgcaaattgtacgcggcaatgaaagcatctatctgctgatgcgttaatgtcgtaaaccgggcatcaggcttacgtgtgatgtccggttaactcgtggtatgctgctgccgttcccttttttaatgacgcctccatcatgtttgtgaagctcttacgttccgttgcgattggattaattgtcggcgctattctgctggttgccatgcctagcctgcgcagccttaacccgctttccactccgcaatttgacagtaccgatgagacgcctgccagctataatctggcggttcgccgcgccgcgccagcggtggttaacgtttacaaccgtggtttgaacaccaactctcacaaccagcttgagatccgcaccctgggatccggtgtaatcatggatcaacgcggttatatcatcaccaataaacacgtcatcaacgacgccgatcagatcatcgtcgccttacaggatggacgtgtatttgaagcattgctggtgggatctgactctctaaccgatctggcggtacttaaaattaatgccactggcggtttacctaccattccaattaatgcacgtcgcgtaccgcacattggcgacgtagtactggcgatcggtaacccgtacaacctcgggcagaccattacccaggggattattagtgccacgggtcgaatcggtctgaacccgaccgggcggcaaaacttcctccaaaccgatgcttccattaaccacggtaactctggcggcgcgctggtgaacagcctgggcgaactgatgggcattaatacgctgagctttgataagagtaacgatggcgaaacgccggaaggtatcggctttgcgattcctttccagttagcaaccaaaattatggataagctgatccgcgatggtcgcgtgatccgcggctacattggtatcggcggacgtgagatcgcaccactgcacgcgcagggcggtggtatagatcaactgcaagggatcgtggttaatgaagtgagtcctgacggcccggcggcgaatgcgggtattcaggtcaacgatctgattattagcgtggataacaaaccggccatctctgctctggagacgatggatcaggtggcggaaattcgccctggtagcgtgatccctgtagtagtgatgcgtgatgataagcagttaacgctgcaggtcaccattcaggaatatccggcaaccaattaagtcgtgcgctcaaaacaaaaaaccggagtctgtgctccggttttttattatccgctaatcaattacttattaacgaactcttcgcccagggcgatatctttcttcagcgtatccagcataccttccagcgcgttctgttcaaatgcgctcagggtaccgatagatttacgctcttccacgccgtttttacccagcagcagcggttgagagaagaaacgggcgtactgaccgtcgccttcaacgtaggcacattcgacaacgccttgttcgccctgcagtgcacgaaccagagacagaccaaaacgtgcagctgcctggcccatagacagggttgcagacccgccaccggccttcgcttcaaccacttcagtacccgcgttctggatgcgtttggtcagatcagccacttcctgctcggtaaaactaacgccaggaacctgactcagcagcggcagaatggtaacaccagagtgaccgccaataaccggcacttcaacttcgcctggctgtttgcctttcagttccgcaacaaaggtgttggaacgaatgatatccagcgtggtaacgccgaacagtttgtttttgtcataaacaccggcttttttcagcacttcagcagcaattgcaactgtggtgttaaccgggttagtgataataccaatgcacgctttcgggcaggttttcgcaacttgctgtaccaggtttttcacgatgccggcgttaacgttaaacaggtcggaacgatccatacccggtttacgcgctacgcctgcagagataagaacgacatctgcgccttccagcgccggagtcgcatcttcaccagaaaaacctttgattttcacagcagtagggatatggctcagatcgacagccacaccgggagtcactggagcgatatcatacagagagagttcactaccactaggcagttgggtttttaacagtagtgcaagcgcctggccaataccgccagcagcgccgaggactgcgactttcatcctaaactccttattatattgataaactaagatatgttgctccgctgccgcgaccttaatccacaaaattgccgtttacaatgaccacatctcaagaatgtgtagtcacgcaagtttagcgtttatgcatttaattgccgtaatcaggaacctaacttacgtaattaacagtcgcttatgcattagcgcaacattccaacaggtggtgacaatataccctaccgttcagccaaaacaacatcaatttgataacaattaatttacttttaagcagaatttgcatgccgtgacgcaggcatgtttctcaataacgaaatttgataaaatcccgctctttcataacattatttcagccttcttcagggctgactgtttgcataaaaattcatctgtatgcacaataatgttgtatcaaccaccatatcgggtgacttatgcgaagcagcgctaagcaagaagaactagttaaagcatttaaagcattacttaaagaagagaaatttagctcccagggcgaaatcgtcgccgcgttgcaggagcaaggctttgacaatattaatcagtctaaagtcagccggatgttgaccaagtttggtgctgtacgtacacgcaatgccaaaatggaaatggtttactgcctgccagctgaactgggtgtaccaaccacctccagtccattgaagaatctggtgctggatatcgactacaacgatgcagttgtcgtgattcataccagccctggcgcggcgcagttaattgctcgcctgctggacagtctgggcaaagcagaaggtattctgggcaccatcgctggcgatgacaccatctttaccacccctgctaacggtttcacagtcaaagacctgtacgaagcgattttagagctgttcgaccaggagctttaatctctgccccgtcgtttctgacggcggggaaaatgttgcttatccctctcaaccccctgctttcccctgcgattaatttaacgaatagtgcgttttactgcgacatgtcattcacacaatgaatacataaggtaaaaaaagcacattatgcaaaattcattatctaattgaaaaaactagaattaacgataaataaccgtatttttaattcttttttgttattaaaattcacatttttaacacttagtatcaactgaaacagttagcgcggtattaattagctcaataattagtgtatacttgattttgtgatatgggtcacgaaacaaaggcccagctaaaagattatgtcgaggtaaaaatcatgaaaatcaaaaccactgttgctgcattaagcgtactttctgttctctctttcggtgcattcgctgccgactccattgatgctgcacaagcacaaaatcgtgaagcaatcgggaccgtatccgtaagtggtgtggcgtctagcccaatggatatgcgtgaaatgctgaacaaaaaagcggaagagaaaggcgcaacggcctaccagattactgaagctcgtagcggtgacacctggcacgctacggctgaactgtacaaataaaccctcatcgtcttgtccgacgatattgcccccggttcgggggcttttttttgcgttaatgacgaacattaaaacgcaaatgcccttccagctcttcctctgcctcatcaaacagcaatattaacgcgccaaaacggcgacgcgttttctctcccagatgaacaaattcaatctcaagtggtagcggcaggacatcgttcattaacacatcccatagactgtcgagatcgcgtaccttatctttcgccagaccaaaggtttggctaaagtcacgataaaaatcctcctgactctcaatctcatcaaaatcaaaggtataaatattcatctgttgccaccgtcacgtttcgcggcgagttctgccgtgcatcgctaagtatagccatgaaaaaaccgacgcttttggcgtcggttttgacttaactatcggtcaacgcatgttgatacttatggagcatccccgccagccgatttaccggttccgtcacctgcggtggcgcttgccagatgcgtagcttttcctggtagatttccagttcttccagcaactggccaaagtaccgacgacgtttatcatcgctacgggcagatatcacatggtctgctgtgcggcgcatttgtcggtgaaacgcgcttaaatcctcgttaaccgggatcggtgcatcacgcaggcgctggtgcgcgataatcatcgtcagcgccaggcgaaatttcggcaaatcccctgggaacttattcatcagcaaaaacagctgctgataaagtgccgggaggtggttctctttacgacgtgccacattggtagtcatcgcggaaacagcggcagaaacaaactgattaagcagtacacgtccggtcctgtcgcggcttttatcccgcaccagcaaaataacggtgaacgcgagcacacagccgacgatttgccctaatgcgctgtcgagaaactgactgaaatggaaagtcatcgggttatccagcacgataatatttatggtgctggccagtgcccccatgctgcccagtcgccgtttctgtacttctataccgaggaagaatcccagcactgccaggctaatgcacagcagcaacatgctctgttgggtattagggataatcaccaaaaagtagagcagccctaacggcagcgcggccagcgtcccgtagataaagtcgatcgccaccatgcgtggattcggcaaacgcattgccagactcgtcactaccgcaatcatcaccattgcaccactgccggaagtccagcccgtccacagccagaaaagcgtgcccagaatgcaggaaagtgtggttcgccagaagttacccattgcatgatgacgttcggcactctctacttttacttccggttcgccttgcaggatctcttcttcggtggcgttgatttttgtgttactgataacgccgcgcttgagaagctgataacgcgttgccgccgcgacccagctataaatggtgacaggcgtttcccgttccccggtccaggcgataactctccgcaggcgtttgagctgcttgtggacgtcctgcgcggtttctaccggcgtgtcaaaaaattcgcggaaagtatcagtgatcaattccgggcgcgtattctgaataagataagtttcgcaggattgggtaatcagcgtcaggcttagcgtattgatcgcttttaaacgtcgattggcccgcgcccagcgggaagattccatattcaggttgctgcgcatgccttgtagcgccgtggtgcgtcgcaccaggtcgccccaggctttatcgacaacttcaccatcgccatgcttgatacagagttgcattaattgatattgcgcgaccagcaaactttccagctctcgatccacttcttgtttgatgcttcgcggagaaaagagcaaatccgccataatcgcacacacaataccgataacgatctcgctacaacgttcgacggcaaactgcggcgtaagcaatggttccggctgaatggtgatcacaatgatcagcgcggtataaccggccagcccccacgcatagctgttttctattcgtaccaggctggatatccaggtacaaaaaccggcccagatacagcacaccagaatcatcaataatggtgcgcggatcatcgcaatgatgatcaccagtccggcaatacagccaataaatgtgccgatgatgcgcaaaaagccacgatagcgaatagcgccagaatacggttcacctcccgcagcaaaggccgtaccggcggcaacaatcgccgctgtcagtaccgcccagcgtggcgtttccagctggaagtgaaagccaacaaacagcgccagtacaatggcggtcgccagttttaccgcaaagcgaatatgttggttagcaatggagaaaatacccatcgtgattaaccaaactcacgcaggcgatgggccattttacggaagaagctatcctggctttcgtcgcgatcttgtttgccagtgaccaccactgtagcagtggtgcccgcaggccagatgttctcttgctggttgtcgagacgaatacgaaccggaacacgttgcgcaagacgcacccattcaaggttagagtctatagtcgccatccctttgtcgtcacgcgtgctgctggcgttggtgacccctgcggcaacactatcaacagtccctttcagcactttgttactgccaagcggcgtgatctctgcacgataccccggacgcaccccttccagcttagtttcttccatataggccagtacatagaaggagttctgtttcaccagcgcaaccgccgtacttcctcgagtaataaactcaccggtatagacgttgaggttggtcacccagccatctgctggcgcgcggatcaccgtgcgttcaagatccagttttgccagatcgcgggtcgcctgcgctttcgctaactgatgcagaaccgtttgtagtacgttgttggcctggtcgatctcttcgcgagacatcgcctgcacaccgagacggttacgacgtccggcctcctggcgtttctcctgtgccagtacctgataataagcaacatcggcttgcgcttcctcaagcgccttttgatagcgcggctggtcgatggtgaacagtatctgtccttttttcaccagctggttatcatgaacattcacctgggtaatgagtccagaaacgtccggcgcgatcgcaacgacgtcagcgctaaagcgcgcgtcacgcgtccagggggattcggtgtaatagacccaggcattaaaaattgcgatgaaggccagaatgactaatacgaccgtgatggccgtacgggagaattttcttattagtgttttcacttcaacctcaaacgaacagtcggcttatcaaataaaacaagcagcaatagagcgcggtgttgaacaacgccggatgccagacaaagtcgtagatacctgttggcacaagtacccggcgcaccagccagaaaatcgccagacttaaaagcaattcaaaaaatatcggtgggaaggacagcccaaacaccacgataacgggaaacagactcatgttgaccttggttgtaaagagagagcaggcgttattattttcagcatctgtcgccgcagagaagggcatggaaagccgggcgagagcaacattgctgtagattgatatttaatatattagcgtaactgttatgctgttatctatattatgtgatctaaatcacttttaagtcagagtgaataatggaacgactaaaacgcatgagcgtgtttgccaaagtagttgaatttggctcttttaccgccgccgccagacagctacagatgagcgttagctccatcagtcagacggtaagtaaactggaagatgagttgcaggtaaagctgttaaaccgtagcacacgcagcattggcctgaccgaagccggtagaatttactaccagggctgccgtcgtatgcttcatgaagtgcaggatgttcatgagcaactgtatgccttcaataacacccccatcgggacgctacgcattggctgttctagtactatggcacaaaatgttctcgccgggctgacagccaaaatgctgaaagaatacccaggtttgagcgtcaatctggttaccggaattccagcccccgacctgattgccgacggtctggatgtggtgatccgcgtcggcgcgttgcaggattccagcctgttttcccgccgtctgggcgcgatgccaatggtggtgtgcgccgcgaaaagctatctcacacaatacggcataccggaaaaacccgccgatttgagtagtcatagttggcttgaatacagcgtgcggcccgacaatgaatttgaactgatcgcaccggaagggatcagcactcgcctgatcccacaaggaagatttgtgactaatgatccgatgacgctggtgcgctggctgacggcgggtgccgggatcgcctacgtgccgctgatgtgggtgatcaacgagatcaatcgtggggagctggagatcctgctgccgcgttaccagagtgatccacgcccggtttatgcgttatataccgaaaaagataagctgccgctgaaggtacaggtcgtgatcaacagcctgacggattattttgttgaggtcggtaaattgtttcaggagatgcacgggcgcgggaaagagaagtaattcatattgtactgttacgttgtacaaacctgtgccaacgggttcccctcaccctaaccctcaccccaaaggggcgaggggaccgttcgtgcacgtagaaagattaattatccttctgaaaatagtgaaattattacgcagtaccgccaacagtcaggttatcgactttcaacgttggctggcccacgccaaccggcaaactttgcccttctttaccgcagacacccacgccgttatccagtttcaggtcgttgccaaccatgctaatctgctgcatggtttcgataccggaaccaatcaacgttgcgcctttcaccggcttcgttactttaccgttttcaatcagatatgcttcactagtggagaaaacgaatttgccggaggtgatatccacctgaccgccaccaaagttcggtgcatagataccgtactcaacggattcaataatttcctgcggggtgcttttacccggcagcatataggtgttggtcatacgcggcatgggcagatgggcgtaggattcacggcgaccgttgccagtcggcgtcatccccatcaaacgcgcgttgagtttatcctgcatgtagcctttcagaatgccgttctcaatcagcacgttgtactggcctggcgtaccttcgtcatcaatcgccacgctacctcggcgatcgaccatcgtgccatcatcaaccacggtacacagttcactagccaccagctccccgacctgtccactaaatacactagtgccacggcggttgaagtcgccttccagaccgtgaccaaccgcttcatgcaacagcacgcccggccaacctgcgccaagtactaccggcatggtgcccgctggtgcagcaacggcagaaagattgaccagcgccatacgcactgcttcttttgcccatgcatccgcacggacttcgccgtcgagatcggcaaggaagaattcataaccaaaacgaccgccgccgccactggcaccgcgttcgcgtttgccatcttcttcgacgagaacgctcacggaaagacgcaccagcggacggacatccgccgctagcgtgccgtcggtggccgcaaccaaaattaattcatagacaccactgaggctggcagtcacttcctgtacgcgcttgtccgcttcgcgggcaaccttatcgacgcgacgcaggatatccagcttctcttcacggctcatgctttgcagcggatctacgctggtatacaacgggctatgctctaccgcgcccagcgtctgtactttaccatcaccactatcacggacgatggtgcgcgccgcttgcgcactctgttccagcgccagcaggctgatttggtcagcgtaagcaaatccggttttttcaccgctgattgcacgcacaccaacgccctgatcgatgttgtaagaaccatctttaataatgcggtcttctaaaacccaggattcgtgatagctgctctgaaaatagagatcgccataatcaaggcgacgttcggccagttgaccgaggatcgcgaacaagtcctgatgtttcaggccgttcgccgctagcaattgttcacttaccaggttaagactcatcgtttttgctactcgttagttactgcagtagaggattttttacggctgccggatgcggcgtgaacgccctatccagcctacggttatgttccggtttgtaggcctgataagacgcacagcgtcgcatcaggcaacggctgtcggatgcggcgtaaacgccttatccgacctacggttatgttccgtttgtaggcctgataagacgcacagcgtcgcatcaggcaacggctgccggatgcggcgtaaacgccttatccgacctacggttatgttccgtttgtaggcctgataagacgcacagcgtcgcatcaggcaacggctgccggatgcggcgtgaacgccctatccgacctacggttatgttctggctcgttggcctttggcaacgattatcctatgagattggggcaattacgcgccctcgtcaaatcattgcgctttttctttacgcggttggcgcaacacttcgttgatttgcggatcgtccagcggaccgctaatgtgatagcgcaaaatggagactttgctccacagcggccccagcactttactggcggcaaacactgccgcgccaacaatggggttaaccgcaaaagccgcagccacgcccaccgtcgcagaaatctctggtgcgacaaccgcttccatattcaggtcgcgacgtaccagatttacgctccctttcatggcgatatccgcctccaggccatccaccagcgtgtcgtcggtgtgcataacgccgtctttaatccacgcggtgctgcgaatggagtcaaaatagaacccttcgccaaaagtgtctctgaaatcaaaacgcagcttacgcatcagggcatctacgctcaataagcgcagcaattgcccggcatgtccggtattgatttcggtaatttcgcctttacccagttgagtatgaatgatgccattcaacgtcgcttcatctggctgccagggtgctttgcgccagtgtaaatcgtaatccacattaaaactgctctggcgtatgggcgtcgtgacaccaaaaaattctgcggcggcatcaattttctgcccgcgcagttttcctttcaggctggtacgttcattccccggattattaacccattcaccatcggcagtaagccggctgaaaccagtatcaatcagtccattggtcagcgttaacgtatcgccagaaatggtgatatcactgtcaatgcgaccgaatttttgcccccagaaccagcactctgtgcatcgtatttgggcgtccggccagccacggaagttaatgcgctccgttgtcgggaaaggactactcggcgtactatcaccacgagttttcgccacgctcgggttgtaataaagatatttgatattcgccagccacggcgcgttattacgcatcgctagcgtggcgttgatttcacgcccttgcgcttcaaccagggtgccatttgccgtcggttggctaacaatactcaggttattccattgctgatttcccagactcaacataggcgtacgtaacgttatgtgttgtgggaaactcgctgcaccaccgacactctccgcagcgcctttctggaacagggccagccactcggcaccattcatcggcggcatattgagttcaacgccactttgttccggcaacggcgggagcgttttactgtctgccgcccaaatagcacgatcgagcgtcagcttttgaccgagcaaccagcggctattgaaatgattatccgcaccagcctgtccggttaattcaaagctgttgagattgccatcaaccttaacgtttaccgctagtggttcacccgcaggtttggctaacggactaggtaagtgactgctcacattctttagatcgccgttcagctctatgttataggtcgcaccagcatgataaggcagatcaatgcccactttaccatcccacgccacgctgccactcaatgcttcgttcaccgcttcaggcagaacgccggttttcgccggttgccagttaccgttgaggtttaccgctacctggtaggcttttgccccttctttggtggaaaaatccacgttcaacggctgattaaaccagcttgctgtcagtggttcactttgcagatcgctattgataaagctgaatttaccgctcaaatttttcagggtgctgtcgagtggtttgataaacagactgttattacgcagcgtcacttcacctttcgcggttaccagttcgccgttcagcgggatatcaagatgtaagcgagcattcacatcgccgtcgagctggagttcttgcagggtcgcacccagagaatctttcagcggtgtctcatcaaagtaagggccaacggctttacccggacctttaatgtcagcgtcaatcagcagtttttctttactgtagtcagggatcactgcggtaagattactcgcgcgcacgccgcccagattaacgccatcggttttcatccataaaccgtcgttaataaagtccagttcaatatcaaggttagttaatgcaggccagtccggctggaaggcaaacttcgcgttgcgcagcggcaccagcacttcaaactgaccttcgttgtgtttataggggaagagttgcggattgccaccataaaccagcgtcgcgttatccgcttcaccgccctgaatcgcgccacttaagtaatcaaccaggtctttacccatcaagttttccgggaaatagcgccaggcttgactaccatcatcggtactgatgccagccagaatacccagccagggttcatcgttagcaggttgcaggtaacgaaaaccgccgcgcgcatggacggctttggctttaacgtcaatattacgcccatccagctggaaacctttgttattgttcagccagcttatagttgcctggccgtcggcgatttctagtggcgcacggaataccgtttcgtaaggcatctttgcctgcttcatgctcgcggtaagcaaaccattttcaacgctgccggaaagcgtcccggagaagtgttccgcacccggtaataatttccattgcttccaggccagatcgctccagcttgcctgaaaacgggtcttgtctgccgcctgaagcgggatatccagcgccagagtgttaatcttgccgctcggttgtgtggagcgccaaacatcacccagtgcaggactaagtttcgcggccagcgggcgtatgccctccaggcctgccagctccagattactggcgcgaatccggagttcgtcactgcgtttattgtctttgccgccaacgtcctgttccggtatccaggccagcgtcaatgctccgctcggccagggtttgccgtccatcgtgatccgtgtatcgggaatagagaactgccagcccggattttcacgcgtaatatgcgcggtcagattatccacgctcagcgtatgcgtttgcttctcgcccaaccagctggcaccgccctgtttcagccagacgtcaccgccggttacatcgcctttgtcgatcgtcatccagccttcaagggagaactgtgccgtttccagcgcaatattgtcctgcatccatttaccgagccacggcttcaggtcgatgtcatccgcctggagccagacgcgaccattgcttaacaacccctcatcatcgcgcaaatccatgcgcacctgcatcacgccgtgctgtccggtaaggctggagaggcttaccaggccttccgcacggtgtcgacgtggatcgttcagccaggtgagttgtgggatcgccagctcggcgcgctgaccggatggcgtcaggaaactgacttcactgtcgcgaagatcgaaatggtcaaattgacgaagaaacagatcgctgatgtgactggcttccagactgtcatcactaccaccgctggtgataggagtgttggtgcgaaagcgcagctgccagaaagtgaggtcgcgaaactgccagcgcatatgtaacaggctctgccagacatccagcgccagagtaacgcgtttaacgctaaattcgccgccatcttttagttctgcacggatgtcgtgtgcttcaagcgtcgggccaaaattctgccagctggcactgagctgactggcttctaccggcatgccagtcgcggattctattttgttgaggatttccggacgccaggcgtcaagatgcggtaaagcaatacgcaggccgctaaccagcagggcagcgatcacaacgagcgcggctccagtaagcagtaaaatccccggcaatcgcctcacccgtcactccttgtctgctaaaaatgtgactcaaaaaccctttgccggatggcggcccagcatctgtttacatcattacgacgtcaaactgctcctggttatagagcggttcaatttgtactttaacctgtttgccaacgaaaatttccacttccgccaggctgtgactctcttcgcctttcaaggcttcagctactgccggagaagcatagaccaggaaacggtcggagtcgtaagcatggtggacacgaacaatctcgcgcatgatttcatagcataccgtttccacggttttcaccgttccgcgaccgtggcaggttgggcattcgttacacagtacgtgctcaatgctttcgcgggtgcgtttacgcgtcatctccaccagccccagcgcgctaaaaccattaacgctggttttcacccggtctttgctcaacgcctgctccaggctgtgcagcactcggcggcggtgatcttcattattcatatcgatgaaatcaataatgataatcccgcccagattacgcaaccgtaactggcgagcgatagcctgcgtcgcttcaatattggtattgaaaatggtgtcgtccagattgcgatgaccgacaaacgctccggtattgatgtccacggtggtcatcgcttcggtctggtcgataatgagataaccaccggatttcagttctactttgcgttccagcgctcgctggatttcgttttcgacatcaaagagatcgaaaatcggctggcgtcctgtgtaatgctccagcttgcttgtcatctcgggaatgtactcgctggtgaactcaagtaacgcttcgtaagtcaggcgactgtcaacgcgaatgcggtccagttcggcatcggcgaaatcacgcagaacacgctgcgccagcgccagttcgccgtacagctgataacgggtctgcgggcgttttttacgctccataactttggtccagacgcgtttcagataagcggcatcggaggccagttcagcctcgccaaccccttccgctgcggtacggatgataaacccgccctgctcgtcgcaatactctgcgaccacttttttcaggcgttcacgttcactttcgctttcaatacgttgggaaaccccaacgtgagaagcccctggcataaacaccagatagcgagaagggagcgtgatatcggtggtcaggcgcgcacctttagtgccaagcggatctttcaccacctgcaccatcagatcttgcccctgacgaaccagttcgctgatgtcgcgcaccgtgaattgcttttgttcttcacccgccacacattcggtgtgcggcatgatgtcggatgcatgaagaaacgcggctttatccagcccaatatctacaaaagccgcctgcatacccggaagtacacgacttacacgacccttgtagatattgcctactattccgcgtcgcgcctcacgttcaatatgaatttcctgcagaataccgccatcaatatacgccactcgcgtttcgctaggcgttacgtttactaacaattcagccgtcatgtttatcccttttctcacgcagtgcgttaaaattacttaataattcatacgtttcaaccagcggtaagccgactacggcgtgatagctgccatttatcttcctgacaaaacagccacccagcccctgaataccgtatgcacctgctttatctaacggttcatcgctggcgacatagcccgcgatgtcttcgtctgttaacgttctgaaagtcacatcggtgaccaccaggcaatcgagaatgtgctggctgtcggccaacgccactgctgtcatcacctgatgggtctgaccgcttaatttgcgcaacatctgcgccgcatgctctgcgtcgcgcggtttctccagcacttctccgttcaggataacgatagtatccgcacccagcaccgggagatccttcgccgtttgcgcgacacctgcccgtgctttctcgcgcgccagacgcacaacatactgctgcgcgctctcctgcggctgacgctgctcctcaatgcccgtaacaatacgttcaaaggtcacgccaagttgcgcaagtaactcctgacgacgcggagaaccggaagctaaatacagagaagtcatagaaacctttattgcactgcaaactgctgacggactttgcgcatcagcaagaaaatccacggccagagcaccccattgactacactactccagaacacttccggtctgaaagagacgttaatcactaaaaactctgcccagaaaacaataatatccaccaccaggctaagcaacatgacgaccagcgcctgctgccataatgcgaggttgcggaaaagctggtatttcagcgccaccaggtaagcaatgatgctcatcgccaatacgcgtacgccaagcgtgctgccgctgatcagatccagtatggcacccatcacaaaacctgtgcccacatttacgcgatgaggcaaggccaggatccaatacaacaagatgagtaacacccagtttggccggaaaacaatcaggttatccggccagggcatgatttgcagcaacagcgcaatgaggaaagagagccagattacccagcgtccctggctacgatagctcgccactattgccctcccggcgcacgttattgccctcccggcgcacgcgcaggcggttgagcaccactttgcggcggcgtagccctttgtggagagcgattagcagcaggctgtgtcggcgcagcaggcgcagtagctgcatttcctgtcgccggttgctgcggagtcggctgagcgatccccgttgccggttcaggtaactttggccccatcgcgtctgggctaggcaatacctgcggcatcatctgcatcagacgttcattagcaacacgatgcacctcttccggcgtcatcgggttagcgccgttacgatctgccccccacagcagcagcagataacgcaaacgttgcagccctgcagtcggacgcgcctgaatcacagtataagcgcgctgggtatcgagttttacggaagagacaaccgcgaccggatagccttccgggaaacgaccgcccagaccggaagtcaccagcacatcaccaacacgaatatccgtattcgccggcagatgctcaagctgcaaatcatccgtacaaccgttaccggctgcaattacgcggatatcgttgcgcagcacctggattggcagcgcgtgggtcgcatcacaaatcagcagcacgcgactggtcagtttagcgacggccaccacctgaccaacaacacctttgtcgctgatgaccggctggccttcataaacgccattaacgctacctttatcgataacaacttgatcgctataaggatcgttaaccgtggagataacctgagtcaccattttctgctcatcctgacgcagcggggaacccagcagctcgcgcagacgcgcgttctcctgtttgtattgtccaagcatcagcagttcactgtttttcagcaacagttcctgacgtaacgcccggttttcaagttctaattggtcacggctggccagcgtctggcttacgccatccagcaattcacgaggagcattggaaacaaagtagaaaggactgacggcggtatccatataagtacggatttgactgaacgtccccaggcggctgtcggcaataataatgccgagcgccaccagcaccgccagaataaggcgaatctgtaggctcgggccacggctaaaaattggcttcataagttatgcgtattctcgtatcagaccaggcagggtaaacagacacttcccctgcctgcatccgattactcttcgctgaacaggtcgccgccgtgcatgtcgatcatttccagcgctttgccgccaccgcgcgccacacaggtcagcgggtcttcagcaacaacgactggaatgccggtttcttccattaacaaacggtcaaggttacgcagcagtgcgccaccaccggtgagcaccatgccgcgctcggagatgtcggaagccagttccggcgggcactgttccagtgcaaccattaccgcgctcacaataccggtcagcggttcctgcagtgcttcgaggatttcattggagttcagggtaaaaccgcgtggaacaccttctgccaggttacggccacgaacttcgatttcacggacttcatcgcccggataagcgctaccgatttcgtgcttgatacgttctgcggtggcttcaccgatcagagaaccgtaattacgacgcacatagttgatgatagcttcgtcgaaacggtcaccaccaatgcgcacagaagaggagtaaaccacaccgttcaaggagataacagcaacttcagtggtaccaccaccgatatcaaccaccatagaaccggtcgcttcagaaaccggcaggccagcaccaattgcggcagccatcggttcttcaatcaggaagacttcacgggcaccagcgccctgcgcggattcacgaattgcgcggcgttcaacctgggtcgcgccaaccggcacacaaaccagaacgcgcgggcttggacgcataaagctgttgctgtgcacttgtttgatgaagtgctggagcattttttcagtcacgaagaagtcggcgataacgccgtctttcattgggcgaatggcagcaatattgcccggcgtacggcccagcatctgcttcgcgtcatgacctactgcagctacgcttttcggactaccggcacgatcctgacgaatggccaccacggaaggctcattcaatacgatgccttgtccttttacataaatgagggtattcgcagtacccaggtcaatggacaagtcattggaaaacatgccacgaaattttttcaacatactaagggataatcctgaaagctggggcggaaaagaaaatccgcttactttaccaaccacacgcagcagcgacaaggcgcaaaaatcatctgctacggtgaaaattagtgcagttcgtttcctttgttacaaatctctgcctgagtccagaaaggcttaatgcatcagcagcattcctcgcctgtttgcaaccgcgtaaggtcattcatctgcatatgtgctgcaacaatctggcgagcagacaagcacactcccatgagacgcagcgcgcattattctacgtgaaaacggattaaacggcaggttaaacgctgtatctttgactatattttttcacgttagtatcaagtggctgactggacgcgaaaaaatccccttgcccgcctgtaacaccgcgctgaatcagggtctgccactcgcttcggctacgcacgccggtggcgtaaacctgggtgctggtcccggagcaggcttccaccaggctttgaaccagcagctggttctccgttcgcttctcaatgtttctgaccagccccggatggagcttgagtaactcaacattaagttctttgatccaactggtacttaccagcgtcaaaccagcctggttgacggctacccgtacccctaaagcattcactaaacgaataacaggttgtaaacgactgatatgttgacctacatcggcctctgcaagttcaataattatgcgttttcgttgacttttttcacattgcattaacgtatcgcgcagccaacgctgaaaacgcgggcgaatcaggctctcaacggtaacctgaatcgccagattttcctctggccagtaacgcaatagtggaataagacggctgatttgcagacggtcatactcttcgcttaagccaaactgcaagaccatcggcatatgctccgcgctgctaacctcttcattaccatcgaagatgcggcacatgagttcgcgatgatgaacctgaccttcgcgagtaaccgccggtttttgataaaggcgcgggccgccgcgactgagcatttgctcgataagcgtacgccagcgaacattaccgcgtcctttttcaggcaagctgtcatcgtaaatagcccagctattgccgccctgcaatcccgcattacgcgtggcagactctgcatgttccattacctgctcggtatcctgaccactacgccaggcgcagataccaatgtggatcatatcgtcgcgatcgagcattttattgttcggcaaggtatcaacggctttgattaactgaccggcgatgctctctgcctcttttaacgtccggtgcggtaacagcgcagcaaaatcactgcggtggtaacgcgccagcagtgcgccagggtagcgcatcataaatgtgctcagcagattcgtcagagtgaagaactgttcttcaacctggctgtgcccccaggtatcgctcaacatattgaaatccggcagacgaatcatcatcacgatcccgtgggtacctactttctcctgatcttccagtaacgttgctaactgattatcgaaaaagagtcggttattgaggccggttttcacgtcctgggcggcataagagcggatcagcgtatcaagacggctgtgttgttcgcgtgcgttctgaatttcacgaagcagcgtatccagcgcactgctggttctgggcggccattcatagatggttcccaacacattagagccacgctcaccgtttaagatacgagtagcccgggtttccagcaattcttgcccggcaagttgccgttgtaaccagcgtaccgccaggaagagcataacaatgataaagccaatcgcccccgtgagcggcgcggtggtcatcaagctatggaaatagttgcccatcggatcctgataaaccagacgcaagctcatccccggatgctttatcaacggaacgctcagttcgcgaaacagatcgctggagccaactggacgataactaccatttctggccagggtataaacctgtttatcaccatggagcaggtctacacgaacgatatctgcgctcatcattaattcggtaatttgtggccttaatacgctgaagtcattgctcacaaggtgggtatcaatcgccgtcgccaccgcctgaacgcgatgactaaacttatactgaatggcgttgtagaaacttaggctacagcccagcaaagtcacaaaaattgttaacccggtgagcagcgtaacaaaggcgctaaatttcgtcgttaatctcatccttgtgttaactccgatagtgaggaagcgggcatactagcaaatcagatttatctcgcaatttattgcgcttcatcggctttgcttttccattagcgagtatagtcttcagaaattattttccaatccatcatgcacatgaggaccacttatgcaggcgttacttttagaacagcaggacggcaaaactctcgcaagtgtacagactctggacgaaagtcgcctgccggagggcgatgtcacggtcgatgttcactggagcagcctgaactataaagatgcgctggcgattaccggtaagggaaaaatcatccgtaattttccgatgattcctgggatcgattttgccggaactgtacgcaccagcgaagatccgcgttttcatgccggtcaggaggtgttactcactggctggggcgttggtgaaaaccactggggtgggctggcggagcaggcgcgagtgaaaggtgactggctggttgccatgccgcaagggctggacgcgcgtaaagcaatgattatcggtactgccggttttaccgccatgctgtgtgtgatggcgctggaagatgccggtgttcgcccgcaggacggggagattgtcgtgacgggtgccagtggtggcgtcggcagtaccgccgtggcgctgctgcataagttgggttatcaggtcgttgccgtttccggtcgcgaaagtacccatgaatatctgaaaagtttaggtgctagccgtgttctccctcgtgatgagtttgccgaatcccgtcctctggaaaaacaagtctgggctggggcaattgacaccgttggcgacaaagtgctggcaaaagtgctggcgcaaatgaattacggcggctgcgtggcggcctgtggtctggcgggtggttttactctgccaaccacggtcatgccatttattctgcgtaatgtccgtttgcaaggggtggatagtgtaatgacgccaccagaacgccgcgcacaagcctggcagcgactggtcgccgatttaccggaaagtttctatacccaggcggcaaaagagatatctctgagtgaggcaccgaactttgccgaggccatcattaataaccagatccagggtcgcacgctggtgaaggttaactaaccatttagcagggaataataagagagggaactcattttgaaatcattattcaatcggttaacgggaaaagcggttagccggacagctttcgtcgaacaccttggtcaggaagttatacaacatcatccaaactggaaagtcatgatttcgactgaccacaaattgatgcgcattgatactccactaaacagctattattgatacgcctccgtcgcctgttaggtttatgttgctttgcctgggcgacgctacgcttagccccttacttatttctggtaccatggggtgaataatctgattttgtttgactacaaattaatcactcgaacctatttaatgctgagcattgtcaatcggttaattttgcgtgctttagcattcacatctatccagacgatgcagtgaaaattgggtaatccccagcaaccgctgcgtaatgtcgtctatcttgtcgcgatcctggcatccctacattatttgtggtctgtgaagattatctcattgcagcccctcatcttcgcagggctggcttttcagcttttcaccttacgttataagaagttccgtcgatgatggcgctaatttcgtgaattgtgcggcttgttgcaaattacacggtgttgaaggttatttacatgttagctgttgattatcttccctgataagaccagtatttagctgccaattgctacgaaatcgttataatgtgcgacctcgtcctccctgacgcagtttttgcgctgcggaaaaggtgacattggcgcaacgaaggtatattttgttttttgccggaggatagcagcagatcgctgcacaatgtccgtcaagtctaacattgacactctggggcaaaatagaccggcgtcccggcctgctggaatttatcgctatgcatacagctgtcggggcatacgctttacagacggcggtgaaacgcctgtcacaatcacactaaacaaagagtacggaacccactcatggatattcgtaagattaaaaaactgatcgagctggttgaagaaagtggcatctccgaactggaaatttctgaaggcgaagagagtgtacgcattagccgtgcagctcctgccgcaagtttccctgtgatgcaacaagcttacgctgcaccaatgatgcagcagccagctcaatctaacgcagccgctccggcgaccgttccttccatggaagcgccagcagcagcggaaatcagtggtcacatcgtacgttccccgatggttggtactttctaccgcaccccaagcccggacgcaaaagcgttcatcgaagtgggtcagaaagtcaacgtgggcgataccctgtgcatcgttgaagccatgaaaatgatgaaccagatcgaagcggacaaatccggtaccgtgaaagcaattctggtcgaaagtggacaaccggtagaatttgacgagccgctggtcgtcatcgagtaacgaggcgaacatgctggataaaattgttattgccaaccgcggcgagattgcattgcgtattcttcgtgcctgtaaagaactgggcatcaagactgtcgctgtgcactccagcgcggatcgcgatctaaaacacgtattactggcagatgaaacggtctgtattggccctgctccgagtgtaaaaagttatctgaacatcccggcaatcatcagcgccgctgaaatcaccggcgcagtagcaatccatccgggttacggcttcctctccgagaacgccaactttgccgagcaggttgaacgctccggctttatcttcattggcccgaaagcagaaaccattcgcctgatgggcgacaaagtatccgcaatcgcggcgatgaaaaaagcgggcgtcccttgcgtaccgggttctgacggcccgctgggcgacgatatggataaaaaccgtgccattgctaaacgcattggttatccggtgattatcaaagcctccggcggcggcggcggtcgcggtatgcgcgtagtgcgcggcgacgctgaactggcacaatccatctccatgacccgtgcggaagcgaaagctgctttcagcaacgatatggtttacatggagaaatacctggaaaatcctcgccacgtcgagattcaggtactggctgacggtcagggcaacgctatctatctggcggaacgtgactgctccatgcaacgccgccaccagaaagtggtcgaagaagcgccagcaccgggcattaccccggaactgcgtcgctacatcggcgaacgttgcgctaaagcgtgtgttgatatcggctatcgcggtgcaggtactttcgagttcctgttcgaaaacggcgagttctatttcatcgaaatgaacacccgtattcaggtagaacacccggttacagaaatgatcaccggcgttgacctgatcaaagaacagctgcgtatcgctgccggtcaaccgctgagcatcaagcaagaagaagttcacgttcgcggccatgcggtggaatgtcgtatcaacgccgaagatccgaacaccttcctgccaagtccgggcaaaatcacccgtttccacgcacctggcggttttggcgtacgttgggagtctcatatctacgcgggctacaccgtaccgccgtactatgacagtatgatcggtaagctgatttgctacggtgaaaaccgtgacgtggcgattgcccgcatgaagaatgcgctgcaggagctgatcatcgacggtatcaaaaccaacgttgatctgcagatccgcatcatgaatgacgagaacttccagcatggtggcactaacatccactatctggagaaaaaactcggtcttcaggaaaaataagactgctaaagcgtcaaaaggccggattttccggccttttttattactggggatcgacaacccccataaggtacaatccccgctttcttcacccatcagggacaaaaaatggacactcgttttgttcaggcccataaagaggcgcgctgggcgctggggctgacccttttgtatctggcagtttggttagtagccgcttacttatctggcgttgcccccggttttaccggctttccgcgctggtttgagatggcctgcatcctgacgccgctgctgtttattggactgtgctgggcgatggtgaaatttatctatcgcgatatcccactggaggatgacgatgcagcttgaagtaattctaccgctggtcgcctatctggtggtggtgttcggtatcagcgtttatgcgatgcgtaaacggagcaccggcaccttccttaatgagtatttcctcggcagccgctctatgggcggtattgtgctggcgatgacgctcaccgcgacctatatcagtgccagtagctttatcggcgggccaggagctgcttataaatacgggctgggctgggtattgctggcgatgattcagcttcctgcagtctggcttagtctcggtattctcggcaagaagtttgcgattcttgcgcgccgctacaatgcagtgacgctgaacgatatgctgtttgcccgctaccagagtcgtcttctggtgtggctggcgagtttgagtttgctggttgcgttcgttggtgcgatgaccgtgcagtttatcggcggtgcgcgcctgctggaaaccgcggcgggtattccttatgaaaccgggctgctgatttttggtatcagcattgcgttatataccgcctttggtggctttcgcgccagcgtgctgaacgacaccatgcaagggcttgtgatgctgattggcaccgttgtgctgcttattggcgtagtacatgccgctggcggcttaagtaacgcagtacagaccttgcaaaccatcgatccgcaactggttacgccacaaggcgctgacgatattctgagccctgcctttatgacgagcttctgggtactggtgtgttttggcgtgattggcctgccgcatactgcggtgcgctgtatctcttataaagacagcaaagccgtacatcgggggatcatcatcggtacgattgtggtcgcaattctgatgttcggtatgcacctggccggagcgttaggtcgggcggtgatccccgatctcaccgtaccggacctggtgatcccaacgttaatggtaaaagtgctgccaccgtttgctgccgggatcttcctggctgcaccgatggctgcgatcatgagcacaattaacgcccaactgctgcaaagttccgctacgatcattaaagatctctatctgaatatccgtccggatcaaatgcaaaacgagacgcgtctgaagcggatgagcgcggtaattacgttagttctcggcgcgttgctgctgcttgccgcctggaagccgccagaaatgatcatctggctgaatttgttggccttcggtgggctggaagccgttttcctgtggccgctggtgctgggtctttactgggaacgcgccaacgccaaaggcgcgctaagtgcgatgatcgttggcggcgtgctgtatgccgtactcgcgacgctgaatattcagtacctgggcttccaccctatcgtgcccagcttactactaagtttgctggctttcctggtcggaaaccgtttcggtacatccgtcccgcaagctaccgttttgactactgataaataaagagttttgccatgccttggatccaactgaaactgaacaccaccggcgcgaacgcggaagatcttagcgatgcgctgatggaagcgggtgccgtttctatcacttttcaggatacccacgatacgccagtatttgaaccgctgccgggcgaaacgcgcctgtggggcgacaccgatgtgattggtctgttcgacgctgaaaccgatatgaacgacgtggtggcgattctggaaaaccatccgctgctcggcgcaggcttcgcgcataaaatcgaacaactagaagataaagactgggagcgcgaatggatggataatttccacccgatgcgctttggtgaacgactgtggatctgccctagctggcgtgatgtgccggacgaaaacgccgtcaacgtgatgttagatccagggctggcgtttggtacgggtacccatccaaccacctctctgtgcctgcaatggctcgacagcctcgatttaaccggtaaaacagtcatcgactttggctgtggttccggcattctggcgatcgcggcgctgaaactgggtgcagcaaaagccattggtattgatatcgatccgcaggcgattcaggccagccgcgataacgccgaacgtaatggcgtttctgaccgtctggaactctacttaccgaaagatcagccagaagaaatgaaagccgacgtggtggtcgctaacatccttgcaggcccattacgtgaactggcaccgttaatcagcgtcctgccggttagtggcggtttgctgggcctttccggtattctggcaagccaggcagagagcgtttgtgaagcttatgccgatagcttcgcactggacccggtcgtggaaaaagaagagtggtgccgtattaccggtcgtaagaattaaccttcgcatcgccgtagggtgacgcggggcgaagtgcgagcaagctcacaaaaggcacgtaaatttgccgattatttacgcaaatttgcgtgccaaaattttcattcataaagaaaaattgagaacttactcaaatttctttgagtgtaaattttagtcactattttctaatatgatgatttttatgagtaattatcgcaccacgctcattttaaatgcaattctttgatccatctcagaggattggtcaaagtttggcctttcatctcgtgcaaaaaatgcgtaatatacgccgccttgcagtcacagtatggtcatttcttaactcatgcgcatcggacaatatcagctcagaaatcgcctgatcgcagcgcccatggctggcattacagacagaccttttcggacgttgtgctacgagatgggagccggattgacagtatccgagatgatgtcttctaacccacaggtttgggaaagcgacaaatctcgtttacggatggtgcacattgatgaacccggtattcgcaccgtgcaaattgctggtagcgatccgaaagaaatggcagatgcagcacgtattaacgtggaaagcggtgcccagattattgatatcaatatgggttgcccggctaaaaaagtgaatcgcaagctcgcaggtagtgccctcttgcagtacccggatgtcgttaaaagcatccttaccgaggtcgtcaatgcagtggacgttcctgttaccctgaagattcgcaccggctgggcaccggaacaccgtaactgcgaagagattgcccaactggctgaagactgtggcattcaggctctgaccattcatggccgtacacgcgcctgtttgttcaatggagaagctgagtacgacagtattcgggcagttaagcagaaagtttccattccggttatcgcgaatggcgacattactgacccgcttaaagccagagctgtgctcgactatacaggggcggatgccctgatgataggccgcgcagctcagggaagaccctggatctttcgggaaatccagcattatctggacactggggagttgctgcccccgctgcctttggcagaggttaagcgcttgctttgcgcgcacgttcgggaactgcatgacttttatggtccggcaaaagggtaccgaattgcacgtaaacacgtttcctggtatctccaggaacacgctccaaatgaccagtttcggcgcacattcaacgccattgaggatgccagcgaacagctggaggcgttggaggcatacttcgaaaattttgcgtaaacagaaataaagagctgacagaactatgttcgaacaacgcgtaaattctgacgtactgaccgtttctaccgttaactctcaggatcaggtaacccaaaaacccctgcgtgacagcgttaaacaggcactgaagaactattttgctcaactgaatggtcaggatgtgaatgacctctatgagctggtactggctgaagtagaacagcccctgttggacatggtgatgcaatacacccgtggtaaccagacccgtgctgcgctgatgatgggcatcaaccgtggtacgctgcgtaaaaaattgaaaaaatacggcatgaactaattcaggttagctaaatgcttgattaaaaaggcgctactcggcatggggaagcgccttttttataggtgtcacaaagggagtgaccatgagaacaggatgtgaaccgacccggtttggtaatgaagctaagaccattattcacggtgatgcgcttgccgaacttaaaaagatccccgccgaaagtgtcgatctgatctttgccgacccaccatataacatcggtaaaaattttgatggtctgatcgaagcctggaaagaagatctgtttatcgactggctgtttgaagtgattgcagagtgccaccgcgttctgaaaaagcagggcagcatgtacatcatgaacagtacggaaaacatgccctttatcgatctccagtgccgcaagctttttaccatcaaaagtcgcatcgtctggagttatgacagttctggagtgcaggcgaaaaaacactacggctccatgtacgaacccatcctgatgatggtgaaagacgcaaagaactacacattcaacggtgatgctattctggtagaagccaaaaccggaagccagcgcgcgttgatcgattatcgcaaaaatcctccacagccttacaatcatcaaaaagtaccgggtaacgtttgggattttccgcgcgtgcgttatttgatggatgaatatgaaaaccacccgacgcaaaaaccggaagccttactgaaacgcattattctcgcctcttccaacccaggcgatatcgttctcgacccgtttgctggtagctttactaccggtgccgtagccatcgccagcggacgaaaattcattggtattgagatcaacagcgagtacatcaaaatggggcttcgacggctggatgtcgcgagccattactctgcggaagaactggcgaaagtgaaaaaaagaaagaccggcaacctgagtaaacgaagccggttaagcgaagttgaccccgatctcattacaaagtaaaggatgtgtaagcctggttttcagattattcatttcgtgtatatttcctgccagacttggttaaacatgcacaggctcaggtaatgattcgcaagtattggtggctcgtcgttttcgctgtcttcgtttttctgtttgatactttactgatgcagtggattgaactgctggcaacagaaacagacaaatgccgcaatatgaacagtgttaatccactaaaactggttaactgtgacgaactgaattttcaggacagaatgtgaatttacatgacacttaattcattcgtttgatgaattaatttcgttatgttttcatctggcatgaacattcttaatacgttatcgaccagagcgggggcttgtttataaagatcataacccgccatattcattaaccagttttgaacaattccgctgaaggcaccatcaataataatcatcacaacatctaaatcgaggttatttgctacacaaccttgttgctgacacgcctgcaatacttcgcggagagtctgcggattaaagcccatcttttcgcgtatcactccctcggccagcatctcatcattaaattcacatttgtgatataagattttcagcaacgcctgctggcggggaattttggcaatatattgcaagccgacaatcaatttttcacgcaattgttgaaacgggtcatgctctaatccagccgtcaagtgttcctggattaactcccgcaaactaggctgttgcaaccacatctcattaaacagttgagtcttgttttcgaagtgccagtagatagcgccacgcgtaacgttagcggcgtcggcaatgtcgttgagcgtcgtcttgcttacgccatgctgcgcaaactgggcgatggcagtttcaatcagttcttgccgggtcttcagagcttcggctttggttctttttgccatgattaattattcaggaaataaatatattcgacacagagtgagaaaatagcgaaggttaatctatcacctaatgtgtatttatacgagaggctaatattgagttgctataaatcgttaaataaataatatatattatttacctaagatacattcactacatcaatatatatttcaatttacgaggttttaattctgcctctttcaacccgcgtcaaaataaaacagtagaatattaatctttttttgtgtttatgtgccttgagatgcctgtattcataactattccttacatcgacgaatgataatttgtaggatagcgaactgtatttttctttctgcgagttaacgcgttgcctttttgggtaaataacgcgcttttggttttttgaggaatagtaatgacgaaacatgccaggtttttcctcctgccctcctttattctgatctccgcggctttaatcgccggttgtaacgataagggagaagagaaagctcacgtcggtgaaccgcaggttaccgttcatattgtaaaaacggccccgttagaagttaagactgaattaccaggccgcaccaatgcttatcgtatagccgaagttcgcccacaggttagcgggatcgtactgaatcgcaatttcactgaaggcagcgatgtgcaagcaggccagtccctgtaccagatcgatcccgcgacctatcaggcaaattatgacagcgcgaaaggcgaactggcgaaaagtgaagccgccgccgccatcgcgcatttgacggtaaaacgttacgttccgctcgtgggtacgaaatacatcagccagcaggagtacgaccaggccattgctgatgctcgtcaggccgatgccgccgtgattgccgcaaaagccacagtcgaaagcgctcgcatcaatcttgcttataccaaagtcactgcgccaattagcggacgtatcggcaaaagcactgtgaccgaaggcgctcttgtcactaatgggcaaacgactgaactggcgactgtccagcagctcgatcctatctacgttgatgtgacccaatccagcaacgattttatgaggctgaagcaatccgtagagcaaggaaatttgcataaggaaaacgccaccagcaacgtagagttggtcatggaaaacggtcaaacctatcccctgaaaggtacgctgcaattctccgatgtgaccgttgatgaaagcaccggctccataaccctacgtgctgtcttccctaacccgcaacatacgcttttgccgggtatgtttgtgcgtgcacggattgatgaaggcgtccaacctgacgccattcttatcccgcaacaaggcgttagccgcacaccgcgtggtgatgcaaccgtgctgattgttaacgataaaagtcaggttgaagcgcgccctgtcgttgccagtcaggcgattggcgataaatggttgattagtgaaggactgaaatctggcgatcaagtcattgtcagcggcctgcaaaaagcgcgtccgggagagcaggttaaagccactaccgatacccccgcagatactgcaagcaagtaaggtaatctgacatggcaaacttttttattcgacgaccgatatttgcatgggtgctggccattattctgatgatggcgggcgcactggcgatcctacaattgcccgtcgctcagtatccaacaattgcaccgcctgcggtttctgttagtgcaaactatccgggcgctgatgcgcagaccgtgcaggatacggtgacgcaggttatcgaacagaatatgaacggtatcgataacctgatgtatatgtcctccaccagcgattccgccggtagcgtgacaattacccttaccttccagtccgggaccgatcctgatatcgcgcaagtgcaggtgcagaacaaactccagctcgccacgccgttgctgccgcaggaggttcagcagcaggggatcagtgttgaaaagtccagtagcagctatttgatggtggcgggctttgtctctgataacccaggcaccacacaggacgatatcagcgactatgtggcctctaacgttaaagatacgcttagccgtctgaatggcgtcggtgacgtacagcttttcggcgcacagtatgcgatgcgtatctggctggatgccgatctgctaaacaaatataaactgacaccggttgatgtgattaaccagttgaaggtacagaacgatcagatcgctgccggacagttgggcggaacgccagcgttaccagggcaacaattgaacgccagcattattgctcagacgcggtttaaaaatccggaagaattcggcaaagtgaccctgcgcgtaaacagtgacggcagcgtggtacgcctgaaagatgtcgcacgggttgaacttggcggtgaaaactataacgttatcgctcgtatcaacggaaaaccggcggcgggcctggggattaagctggcaaccggcgcgaatgctctcgataccgcgaaagccattaaggcaaaactggcggaattacagccattcttcccgcagggaatgaaggttctctacccttatgacaccacgccattcgtccagctttctattcacgaagtggtaaaaacgctgttcgaagccattatgctggtgttcctggtgatgtatctgttcttgcagaatatgcgagcaacgctgatccccgccattgcggtacccgtggtgttgttagggacgtttgccatcctcgccgcttttggttactccatcaacacactaacgatgttcgggatggtgcttgccatcgggctgctcgtcgatgatgcgatagtggtggtggagaacgtcgagcgcgtgatgatggaggataagctcccgccaaaagaagcgacggaaaaaagcatgagccaaattcagggcgcactggtgggtatcgcgatggtgctgagtgcggtatttattccgatggcattcttcggcggttctactggggcaatttatcgccagttctctatcaccatcgttagcgcaatggcgctttctgttctggtggcattgattcttacccctgcgttatgtgcaacgctgcttaaacccgtctctgctgagcatcacgaaaataagggcggtttcttcggttggtttaataccaccttcgatcatagcgttaaccactacaccaacagcgtcggcaaaatcctcggatccacaggacgatatttactgatctatgcgctgattgttgcaggaatggtggtgttgtttttacgtcttccgtcttccttcttacctgaagaggatcagggtgtctttctgaccatgattcagttacccgctggcgcgacgcaagagcggacgcaaaaagtgttggatcaagttacggattactatctgaagaacgagaaagcgaacgttgaaagtgtctttacggttaacggctttagcttcagcggccaggcacaaaacgccggtatggccttcgtcagtctgaaaccgtgggaagagcgtaatggtgacgaaaacagtgcggaagcggtaatccatcgtgccaaaatggaattgggcaagatccgcgacggttttgtcattccattcaatatgccagccattgttgaactgggcacggcaacgggtttcgactttgagttaattgatcaggctgggctgggtcacgatgccctaacccaggcccgtaaccagttgcttggtatggcggcgcaacatcctgccagcttagtcagcgtgcgccctaatggcctggaagacaccgcgcagtttaaactggaagttgaccaggaaaaggcgcaggcattaggtgttagtctttctgacatcaatcagaccattagtacggcgctgggtgggacttacgttaacgacttcatcgaccgtggccgcgtgaaaaagttgtatgttcaggcggatgccaaattccgtatgctgccagaagatgtcgataaactttatgtccgcagcgccaacggcgaaatggtgccattcagcgcctttaccactagtcattgggtgtatggctctccgcgactggaacgctacaacggtctgccgagtatggagattcagggggaagccgcgccaggaaccagttccggcgatgccatggcgttgatggaaaaccttgcgagtaaattacctgcgggcattggttatgactggacgggtatgagctatcaggaacgcttaagcggaaaccaggctcccgctctggtagcaatttcctttgtggttgttttcctgtgccttgctgcactctatgaaagctggagtattcctgtcagcgttatgttggtagtgccgttagggattgtcggcgtgctgctggcggcgacactctttaatcaaaaaaatgacgtctactttatggtgggcttgctaacgacaattggcttgagcgccaaaaacgctattttgatcgttgagttcgctaaagatctcatggagaaagagggtaaaggtgttgttgaagcgacactgatggcagtacgtatgcgtctgcgtcctatcctgatgacctctctcgcctttattctcggcgtattaccgctagctatcagtaacggtgccggcagtggcgcgcagaacgctgtgggtatcggggtaatgggaggaatggtctctgcaacgttgctggcaatcttcttcgtaccggtgttctttgtggtgatccgccgttgctttaaaggataaatcagaaacataaaggcgctttcgggtgcctttattatttccagtgaaacccataaaaattaataagatattcttctgctcactctttaaaagctttctatagttcccgctcccttcactatttttacaattcacataatttgtcattattcattccgcaagatttataacctccggtgataaaatggcattcagctcgttaataagagagttaacttattaagcgttagcgtttattactgaggtaacaccatgaaaagattaattcctgtggcattgctcaccgcattgctggcgggctgtgctcacgatagcccctgcgttccggtttatgacgatcagggtcgtctggttcacaccaatacctgtatgaaaggcacgactcaggataactgggaaacggctggggctattgccggcggggcagctgctgttgctggcctgacgatggggatcatcgctctaagcaaataactgaacagggcgcggagttccgcgctctttttaacgatacagtatctctccataagataaaatattgctatattctgctgggtaattccctgctgatttagcatgttacatcgcgttatttcgctgctttcgaaataacgcatcaatttaattttcacacttcccaccagaaatatactcacgctaacaatcattattctgcttagtaaaacacgcgtaaatattttgcgccaaaatgtggcgcatgtttcattttcgcaccattgcggggcgctgtttttattatttcctgtctacactcagcttattgcgacgcgaaatcgtgcgcaaaagctggcactacttttgcttataagaggatggccacagacaggtaaaagacgtttcccaaacgtcctataacgataattttcgcctcacaggaagcattatgaaaaagatgatgatagccacactggctgccgccagcgtgctgcttgccgttgcaaatcaggcgctgctggcgcgacgcttgatgccgttcagaaaaaaggttttgtgcaatgcgggatcagtgatggattacctgggttctcttatgccgatgctgacggtaagtttagtggtattgatgttgatatttgtcgtggtgttgccgctgctgtatttggtgacgacacgaaagtgaaatataccccgctcactgcaaaagaacgcttcaccgctttacagagtggggaggtggatttgctctcccgtaatacgacctggactagttctcgcgatgccgggatgggaatggcatttaccggcgtcacttattacgacggcattggcttcctgacgcacgataaagcggggctaaaaagcgcgaaagaactggatggcgctaccgtctgtattcaggcgggtactgataccgaactcaacgtcgccgactacttcaaggcaaacaatatgaagtacacaccggtgactttcgatcgctctgacgaaagtgcgaaggcactggaatctggtcgctgcgatacgctggccagcgatcaaagtcaactgtatgccctgcgcatcaaattaagcaacccagctgaatggattgtcttaccggaagttatcagtaaagaaccgcttggtccggtagttcgtcgtggcgatgatgaatggttcagcattgtacgctggacgcttttcgccatgctgaatgctgaagagatgggcatcaattcccagaacgtcgatgaaaaagcggctaatccagcaacgcctgatatggcacatctgctgggtaaagaaggcgattacggcaaggatctgaagctggataataaatgggcctataacatcatcaaacaggtgggtaactacagcgaaatttttgagcgtaacgtaggtagtgaaagcccgctgaaaattaaacgtgggcaaaataatctctggaataacggcggtattcagtacgcaccgcccgtgcgttaagtcggtgtgaggtaacgagcgtcgctacggcggcgctctcttcagcgttatgctttccgaggtttctatgtctcatcgccgcagtaccgttaaaggcagtctctcttttgccaaccctacggttcgcgcctggttattccagatccttgccgttgttgctgttgtcggcattgttggttggttatttcacaacactgtaacgaatctcaataatcgtggcattactagtggttttgcctttctggatcgcggcgctggcttcggtattgtccagcatttgatcgattaccagcagggcgacacctacggacgcgtttttattgtcggcttactcaatacgctactggtttctgcattgtgtattgtgttcgcttctgttttgggcttctttatcggtctggcgagacttagcgataactggctgctacgaaagctttccacaatttatattgagatcttccgtaatattcccccgctgctgcaaatcttcttctggtactttgccgtgttgcgcaatttgcccggaccacgccaggctgtgagcgcgtttgatctggcctttttgagcaatcgtgggctttatattccgagtccgcagctgggagacggatttattgcgtttatcctggctgttgttatggctatagtcctttctgttgggctattccgctttaataaaacataccagataaagaccggacaactgcgccgcacctggccgatcgccgcagtgttgatcattggtttgcctttactggcgcaatggctttttggcgcagcactacactgggatgtcccagccctacgaggctttaacttccgcggcgggatggttttaattcctgaactggcagccttaacgctggcacttagcgtttatacatctgcatttatcgccgagattatccgcgctgggatccaggcagtgccttatggtcaacatgaagcggctcggagtctgggattacccaacccggttacgctacgccaggtcattattccccaggcattgcgggtgattattccaccgttaaccagccagtatctcaacatcgtcaaaaactcctctcttgccgccgctattggctatcccgatatggttagcctgtttgccggcaccgtgctgaatcagacggggcaagccatcgagacgatagccatgaccatgagcgtctatctgattatcagcctgactatcagcctgctgatgaatatctataaccgccgcatcgcgatcgttgaacgctaaggagtcatgatgacaaaagtattgctgtctcatcccccgcgcccggcgagccataacagtagccgcgcgatggtgtgggtgcgaaaaaatctgttctccagctggagcaatagcctgctgactattggctgcatatggttgatgtgggaactgatcccaccgttgctgaactgggcatttttgcaggctaactgggttggcagtacgcgtgccgactgcacaaaagccggtgcctgttgggtcttcatccacgaacgatttggtcagtttatgtatgggctttacccacacgaccaacgctggcgaattaacctcgcattactgattgggcttgtgagcatcgcaccaatgttctggaaaatactcccgcatcgcggtcgctatattgcggcctgggcggtgatttacccactgattgtctggtggctgatgtatggcggtttttttgctcttgagcgggttgaaacccggcaatggggcgggctgacgctaactttaattattgcaagtgttgggattgcgggggcgctaccgtgggggatcttactggcgttaggtcgccgctcccatatgccgattgtgcgtatcttaagcgtcatttttatcgaattctggcgcggcgtgccgctgattaccgttctgtttatgtctagcgtcatgctgccgttgtttatggcagaaggcaccagtatcgacaaattgatccgcgcgctggttggcgtgatcctgtttcagagtgcatatgttgcggaagtcgtgcgaggtggattacaggcgctgcctaaagggcaatatgaagcggcagagagcctggcgttgggttactggaaaactcaggggctggttattctgccacaggcgttgaagctggtaattcctgggctggtaaataccatcatcgcactcttcaaagataccagcctggtgatcattatcgggttgttcgatcttttcagtagcgttcagcaggcaaccgttgatcccgcctggttgggtatgagcacggaagggtatgttttcgccgcgctgatctactggatcttctgtttcagcatgagccgctatagccagtatctggaaaaacgttttaacaccgggcgtacaccgcattgaggacactatgagccaaattttactgcaacctgctaacgcgatgattacgctggaaaacgtcaataaatggtatggacaattccatgttttgaaaaatataaatttaaccgtgcaaccgggagaacggatcgttctgtgtggccctagtggttccggtaaaagcacaaccattcgttgtattaatcatctggaagaacatcaacagggacggatcgtggtagatggcatcgaacttaatgaagatatccgcaatattgagcgcgtcaggcaggaagtgggaatggtctttcagcatttcaatctcttccctcatctgaccgttttacagaactgtaccctggcaccgatttgggtacgcaagatgcctaagaaagaggctgaagatctggcggtgcattacctagagcgggtgagaattgccgaacatgcgcataagtttcccggacagattagtggtggtcagcagcaacgcgttgccattgcgcgtagcctgtgtatgaagccgaaaattatgttgtttgatgagccaacgagcgcgctcgatcctgagatggtgaaagaggtgctggatacgatgattgggctggcgcagagcggtatgacaatgttgtgtgtaacacatgagatggggtttgcacgaaccgtcgctgaccgggtaatttttatggatcgtggggaaatagtggagcaagctgcacctgatgaattttttgcgcatcctaaaagtgagcgtacgagggcatttttaagccaggtaatccattaattgaatgttagttcgaaaagcaaaaaggccatcctttcggatggcctttcgcttgatttgatgtctggcagtttatggcgggcgtcctgcccgccaccctccgggccgttgcttcgcaacgttcaaatccgctcccggcggatttgtcctactcgggagagtgttcaccgacaaacaacagataaaacaaaaggcccagtcttccgactgagccttttgttttatttgatgtctggcagttccctactctcgcatggggagaccccacactaccatcggcgctacggcgtttcacttctgagttcggcatggggtcaggtgggaccaccgcgctactgccgccagacaaattcttttctaatctgccgaactttaacctaaaaagtggtgctgatacccagagtcgaactggggacctcacccttaccaagggtgcgctctaccaactgagccatatcagcacgctaaatttgatgcctggcagttccctactctcgcatggggagaccccacactaccatcggcgctacggcgtttcacttctgagttcggcatggggtcaggtgggaccaccgcgctacggccgccaggcaaattctgttttatcagaccgcttctgcgttctgatttaatctgtatcaggctgaaaatcttctctcatccgccaaaacagcttcggcgttgtaaggttaagcctcacggttcattagtaccggttagctcaacgcatcgctgcgcttacacacccggcctatcaacgtcgtcgtcttcaacgttccttcaggacccttaaagggtcagggagaactcatctcggggcaagtttcgtgcttagatgctttcagcacttatctcttccgcatttagctaccgggcagtgccattggcatgacaacccgaacaccagtgatgcgtccactccggtcctctcgtactaggagcagcccccctcagttctccagcgcccacggcagatagggaccgaactgtctcacgacgttctaaacccagctcgcgtaccactttaaatggcgaacagccatacccttgggacctacttcagccccaggatgtgatgagccgacatcgaggtgccaaacaccgccgtcgatatgaactcttgggcggtatcagcctgttatccccggagtaccttttatccgttgagcgatggcccttccattcagaaccaccggatcactatgacctgctttcgcacctgctcgcgccgtcacgctcgcagtcaagctggcttatgccattgcactaacctcctgatgtccgaccaggattagccaaccttcgtgctcctccgttactctttaggaggagaccgccccagtcaaactacccaccagacactgtccgcaacccggattacgggtcaacgttagaacatcaaacattaaagggtggtatttcaaggtcggctccatgcagactggcgtccacacttcaaagcctcccacctatcctacacatcaaggctcaatgttcagtgtcaagctatagtaaaggttcacggggtctttccgtcttgccgcgggtacactgcatcttcacagcgagttcaatttcactgagtctcgggtggagacagcctggccatcattacgccattcgtgcaggtcggaacttacccgacaaggaatttcgctaccttaggaccgttatagttacggccgccgtttaccggggcttcgatcaagagcttcgcttgcgctaaccccatcaattaaccttccggcaccgggcaggcgtcacaccgtatacgtccactttcgtgtttgcacagtgctgtgtttttaataaacagttgcagccagctggtatcttcgactgatttcagctccacgagcaagtcgcttcacctacatatcagcgtgccttctcccgaagttacggcaccattttgcctagttccttcacccgagttctctcaagcgccttggtattctctacctgaccacctgtgtcggtttggggtacgatttgatgttacctgatgcttagaggcttttcctggaagcagggcatttgttgcttcagcaccgtagtgcctcgtcatcacgcctcagccttgattttccggatttgcctggaaaaccagcctacacgcttaaaccgggacaaccgtcgcccggccaacatagccttctccgtccccccttcgcagtaacaccaagtacaggaatattaacctgtttcccatcgactacgcctttcggcctcgccttaggggtcgactcaccctgccccgattaacgttggacaggaacccttggtcttccggcgagcgggcttttcacccgctttatcgttacttatgtcagcattcgcacttctgatacctccagcatgcctcacagcacaccttcgcaggcttacagaacgctcccctacccaacaacgcataagcgtcgctgccgcagcttcggtgcatggtttagccccgttacatcttccgcgcaggccgactcgaccagtgagctattacgctttctttaaatgatggctgcttctaagccaacatcctggctgtctgggccttcccacatcgtttcccacttaaccatgactttgggaccttagctggcggtctgggttgtttccctcttcacgacggacgttagcacccgccgtgtgtctcccgtgataacattctccggtattcgcagtttgcatcgggttggtaagtcgggatgacccccttgccgaaacagtgctctacccccggagatgaattcacgaggcgctacctaaatagctttcggggagaaccagctatctcccggtttgattggcctttcacccccagccacaagtcatccgctaatttttcaacattagtcggttcggtcctccagttagtgttacccaaccttcaacctgcccatggctagatcaccgggtttcgggtctataccctgcaacttaacgcccagttaagactcggtttcccttcggctcccctattcggttaaccttgctacagaatataagtcgctgacccattatacaaaaggtacgcagtcacacgcctaagcgtgctcccactgcttgtacgtacacggtttcaggttctttttcactcccctcgccggggttcttttcgcctttccctcacggtactggttcactatcggtcagtcaggagtatttagccttggaggatggtccccccatattcagacaggataccacgtgtcccgccctactcatcgagctcacagcatgtgcatttttgtgtacggggctgtcaccctgtatcgcgcgcctttccagacgcttccactaacacacacactgattcaggctctgggctgctccccgttcgctcgccgctactgggggaatctcggttgatttcttttcctcggggtacttagatgtttcagttcccccggttcgcctcattaacctatggattcagttaatgatagtgtgtcgaaacacactgggtttccccattcggaaatcgccggttataacggttcatatcaccttaccgacgcttatcgcagattagcacgtccttcatcgcctctgactgccagggcatccaccgtgtacgcttagtcgcttaacctcacaacccgaagatgtttcacttcagagttgcgaaaatttgagagactcacgaacaactttcgttgttcagtgtttcaattttcagcttgatccagatttttaaagagcaaaacttcgcagtgaacctttgcaggtacactctgaagtattttttatttaatcactacagagatggtggagctatgcgggatcgaaccgcagacctcctgcgtgcaaagcaggcgctctcccagctgagctatagccccataacatgtagttaaaacctcttcaaatttgccgtgcaaatttggtaggcctgagtggacttgaaccaccgacctcacccttatcaggggtgcgctctaaccacctgagctacaagcctgtagaggttttactgctcattttcatcagacaatctgtgtgagcactgcaaagtacgcttctttaaggtaaggaggtgatccaaccgcaggttcccctacggttaccttgttacgacttcaccccagtcatgaatcacaaagtggtaagcgccctcccgaaggttaagctacctacttcttttgcaacccactcccatggtgtgacgggcggtgtgtacaaggcccgggaacgtattcaccgtggcattctgatccacgattactagcgattccgacttcatggagtcgagttgcagactccaatccggactacgacgcactttatgaggtccgcttgctctcgcgaggtcgcttctctttgtatgcgccattgtagcacgtgtgtagccctggtcgtaagggccatgatgacttgacgtcatccccaccttcctccagtttatcactggcagtctcctttgagttcccggccggaccgctggcaacaaaggataagggttgcgctcgttgcgggacttaacccaacatttcacaacacgagctgacgacagccatgcagcacctgtctcacggttcccgaaggcacattctcatctctgaaaacttccgtggatgtcaagaccaggtaaggttcttcgcgttgcatcgaattaaaccacatgctccaccgcttgtgcgggcccccgtcaattcatttgagttttaaccttgcggccgtactccccaggcggtcgacttaacgcgttagctccggaagccacgcctcaagggcacaacctccaagtcgacatcgtttacggcgtggactaccagggtatctaatcctgtttgctccccacgctttcgcacctgagcgtcagtcttcgtccagggggccgccttcgccaccggtattcctccagatctctacgcatttcaccgctacacctggaattctacccccctctacgagactcaagcttgccagtatcagatgcagttcccaggttgagcccggggatttcacatctgacttaacaaaccgcctgcgtgcgctttacgcccagtaattccgattaacgcttgcaccctccgtattaccgcggctgctggcacggagttagccggtgcttcttctgcgggtaacgtcaatgagcaaaggtattaactttactcccttcctccccgctgaaagtactttacaacccgaaggccttcttcatacacgcggcatggctgcatcaggcttgcgcccattgtgcaatattccccactgctgcctcccgtaggagtctggaccgtgtctcagttccagtgtggctggtcatcctctcagaccagctagggatcgtcgccttggtgagccgttaccccaccaacaagctaatcccatctgggcacatccgatggcaagaggcccgagggtccccctctttggtcttgcgacgttatgcggtattagctaccgtttccagtagttatccccctccatcaggcagtttcccagacattactcacccgtccgccactcgtcagcgaaacagcaagctgtttcctgttaccgttcgacttgcatgtgttaggcctgccgccagcgttcaatctgagccatgatcaaactcttcaatttaaaagtttgatgctcaaagaattaaacttcgtaatgaattacgtgttcactcttgagacttggtattcatttttcgtcttgcgacgttaagaatccgtatcttcgagtgcccacacagattgtctgataaattgttaaagagcagttgcgacgcggctttcagctcactgtcgcgaggtggcgtatattacgctttcctctttcagagtcaaccctgaatttcaggatttttttctcttcgttgttccgaccatcctgtgaagtgtttcacgttgtcgtctcaacggaggcgcattatagggatcccaattttttgcacaagtatttttttgatctttttttctgtttgttgttttttcaccctttttgctgcaatcgcacacaaaacggtgcttttttgcatactaaaagacttgcacaaggccaataatgcccccaaagtcattagtaaatcatttattgctgaggtaagtatgtctgatgttttacgcccataccgcgatctttttccacaaatcggtcagcgcgtaatgatcgacgatagcagtgtcgtgattggtgacgttcgtctggctgatgatgtggggatctggccgctcgttgtgattcgtggagatgtacattatgtacagatcggagcacgcaccaatatccaggatggcagtatgttgcatgtcactcataaatccagctacaacccagatggcaacccattaaccattggcgaagatgtcactgttggtcacaaggtgatgctccacggctgcaccattggcaatcgagttttggttgggatgggcagtattttacttgatggcgcaatagtagaagatgatgtgatgattggtgcgggtagtctggtcccacaaaataaacggctggagagcggatatctgtatctcggtagccccgtcaaacagatccgcccgttaagtgatgaagagaaggctgggttacgctattccgcgaataattacgtgaaatggaaggacgaatatctggatcagggtaaccagacccagccttgatcatcttcactttgttcctgaattaagttttccgcttcttcttccaggtcccagcgatgctgacgaaaactcgctaaccactgttctggcgtatctccagtaaagcgatacgccagactctcgccagagatcgcgcatgtcagttgcataccattcacgagagcgggaaaacatacacattttttattctcgtcccactcttccctgtccggaaactggatggcctgattcacgcggacaattcctcctgcaattgctttataactggttctacgtcaggcagaacaccgtgccagagaagaaaggcatgagccgcctgtgccaccagcattcctaaaccatcagcattacgcttactgcctcgctgctcacaccatgccagaaaaggagtttttcctttctgatagaacatgtcatagcaataaatgcctggatgaatgaggctactcgggatcgccggaatatcaccactgatgccactggatgttgcattaataatgagatcaaactcatgaccttccagttcgtccatactcaacgcctgaatactgccagtgtgcgcaaacaatttagccaactcttccgcgcgggataccgtccgattagttattgtcaccgcacagtccagggaaaggagtggcagtagtacgccgcgagatgctccaccagcgccgataagcagaatacgtaaaccagggcggataaaagacagacgttccagatcgcttaacaagcctacaccatcggtattgtcacccagcaggcgtccatcttctaaccgcatgagggtattaacagcaccagccaacgctgcccgttcagtaagctcatccgctctggcaaaagcctcttctttaaaaggcaccgtcacattcgcacctttaccaccagcactaaagaaagcgttcagtgtgttgatgaaatcattgatgggtgccaacacgcgcccatagggatgttcaatattcagttgctgagcaaattgctgatgaatgaatgggcttttgctgtgggctatcggattaccaaaaacagcataggtttccattatgttacccctgtcgaaacagttcacccgtcagggcatcgcggatttcactaggatttaaacgcccccccgtttcaccaggcacaaccgggaacgccgcgccaaattgtgcgcgaacttcgtctactgttcgacaaggtggcaatccactcaagttggcactggtagaaaccagcggtttaccataagcctggcacaaagcaaccaccaacggatggtcggtgactcgtacagcaaggctatcaaagcggcccgtcaaccagcgcggtgttgtcgcaggcgcgggaaagacaaaggtgacaggacctggccagcgggaaaaaatggtttcacgctgcacgtcagtcaacatggtgtcatcaatatagggtttaagctgctcgtaatttgctgcgattaaaatcagccccttatcaaccggacgctgttttaactccaacagtcgcatcactgctgtttcgctatcaggatcgcacccaacaccgaaaacggcttccgttggataggcgatgacacgttcttcattgagaacatctatcgcagctgcgatagcgtctctttgcaggttattattcacgttattattccgcgctaaccggctttccacattgtttactggcacaaaagtgttttacaccctgcgcggttttcttttcgatgagtagcggataatgacactcagggcattctccagctatgggtttgaagttaatggcaaattgacactccgggtagcgatcacaagagtgaaatgttttgccataacgggagcggcgctggaccagatggcccgtccgacattgggggcatgtaattgctgtttcgtccggtttatcgataagttcggtatgttcgcattcagggtagttaatgcaaccaataaacataccaaagcgtccctggcgtaataccagatttgcgccacatgcagggcaaacctgcccctccagaactttgacgatatgtccatccgcactagatttcagaggacggacgtagtcacacgccggatactgactgcatccaagaaacggaccgtgtttcccggatcgaataaccagttcagccccgcactttgggcaggactcattattacgcaccgtgaacagtgcacttttcgccataacaacttatgctgaattaaagaaatgattaatgcagcataccttcattcacttcaaagagtaattcttccatttgctggtacgcattttcgcagcccggaatattgaacaacaccatcaggatcacccatttcagatcatccagttcgaactctgcgttatccagcgcgagcactcgctctatcaccatttcacgagtttcaaggttgagcacctgaatctgctcaaggaaaagcagaaacccacggcagctggcatccagtcgttcacactcttccggtgtataaatacgcatggagagaggatcgctggccagttgcatcggttctgccaacccttcctgataatcagcaagtttttccagccatagcagggcattgtagatatcttctcgctcaaaacctgcgtcggtaagatcctgttcaagtttgtcttgatccacacgcaactcagcttctgtgtgaatataggtttcaaacaaatacattagtacgtcgaacatggcatgccctcctcaatcggacatagccgccgggtacagctgcgatccatcctgctaactccagttcgagtagttgagtaactacctctggcacaggttggccggcacgttcagcgacgacgtcaacaggtgttacctcatctcctacgttagccaggagctcaggaaatggcaatgccacgtcttgctgatctggactataaaaactattttcaggggcgtctggcaaccagtgcaatccaaattgcaagttttccagaatttcttccggttccgtcacaagaatcgcaccttgttttattaaccagtgaggcccttcgcttcccggattccctattggacctggcaaggcaaaaacttctcgcccctgctcaagcgcacaacgtgctgtcaccaggctaccactacgcaaagccgcttccaccaccagtacacctttacttagaccactgataatgcgatttcttcgtgggaaattgtaagcaaggggtggaacatcgaggggaaattcgctgacgagagcgcccccctgttcaagcagactggcagccagtcgggcatgacggcggggatgaatggtattaagtccattccccaatacagcaatgctgacgccatttacctgtaaggctgctttatgcgctacaccatcgattccacgcgccagtccactcgtaattgtcactccacgcgtcgccagagtttcgcaaaataatcgtccccatcgctcgccataccaactatgcgcccgactccccactacggcaagctgaaaactatgcagcgcgtgcagttctccttcaacaaacagtgcgccggggtaatctgtcgtcgccagaagttgaggaggataaaattcgctgtccgcaggaattaaatgatggttgggttgctccaaccaacaaagactgctttcgatactctttcgtggaaaactaagaaagcgttgtgcctgccgcaatgtaagccctgtttgctgcaatacaaccgcatcaatatggctctgttttgccacccagtgagcgatacggaccatatcatcgccgtacaagctgctgatactcattaaacgcagccaaatttctgtatcgaccatccttatctccctgccataagcagccttagcaatctttgcgattggtcagtgatgctgtcaatcagagggggatttgtctagaatagaagaaataatctttctaactcctgaacacatctctggagatttatgagtgttttgcaagtgttacatattccggacgagcggcttcgcaaagttgctaaaccggtagaagaagtgaatgcagaaattcagcgtatcgtcgatgatatgttcgagacgatgtacgcagaagaaggtattggcctggcggcaacccaggttgatatccatcaacgtatcattgttattgatgttagcgaaaaccgtgacgaacggctagtgttaatcaatccagagcttttagaaaaaagcggcgaaacaggcattgaagaaggttgcctgagcatccctgaacaacgtgctttagtgccgcgcgcagagaaagttaaaattcgcgcccttgaccgcgacggtaaaccatttgaactggaagcagacggtctgttagccatctgtattcagcatgagatggatcacctggtcggcaaactgtttatggattatctgagtccgctgaaacaacaacgtattcgtcagaaagttgaaaaactggatcgtctgaaagcccgggcttaaggataagaactaacgtgagtgaaagtctacgtattatttttgcgggtacacctgactttgcagcgcgtcatctcgacgcgctgttgtcttctggtcataacgtcgttggcgtgttcacccagccagaccgaccggcaggacgcggtaaaaaactgatgcccagcccggttaaagttctggctgaggaaaaaggtctgcccgtttttcaacctgtttccctgcgtccacaagaaaaccagcaactggtcgccgaactgcaggctgatgttatggtcgtcgtcgcctatggtttaattctgccgaaagcagtgctggagatgccgcgtcttggctgtatcaacgttcatggtagtctgctgccacgctggcgcggtgctgcaccaatccaacgcagtctatgggcgggtgatgcagaaactggtgtgaccattatgcaaatggatgtcggtttagacaccggtgatatgctctataagctctcctgcccgattactgcagaagataccagtggtacgctgtacgacaagctggcagagcttggcccacaagggcttatcaccacgttgaaacaactggcagacggcacggcgaaaccagaagttcaggacgaaactcttgtcacttacgccgagaagttgagtaaagaagaagcgcgtattgactggagtcttagcgcagcacagcttgaacgctgcattcgcgctttcaatccatggccaatgagctggctggaaattgaaggacagccggttaaagtctggaaagcaagcgtcattgatacggcaaccaacgctgcaccaggaacgatccttgaagccaacaaacaaggcattcaggttgcgactggtgatggcatcctgaacctgctcagcttacaacctgcgggtaagaaagcgatgagcgcgcaagacctcctgaactctcgtcgggaatggtttgttccgggcaaccgtctggtctgatagtccactcttctaagcccggtcttgccgggcgtttttatacttatgaaaaaacaacgtaatttacgtagcatggcggcccaggccgttgaacaagtcgtcgagcaagggcaaagtttaagcaacattctgccaccgctccagcaaaaagtttccgataaagacaaagcacttcttcaagagttgtgctttggcgtactgcgtacgcttagccagttagactggctgattaataagttaatggcccgtccgatgaccggcaaacagcggaccgtgcattacctgattatggttggtttgtatcaactgctttatacccgcattccacctcatgctgcgctggctgaaacggttgaaggcgctatcgcaattaagcgtccgcaacttaaagggttgataaacggtgtattacgccagttccagcgtcagcaagaagagttattagccgagtttaatgccagtgatgcacgttatctgcatccttcctggttgctgaagcgtctgcaaaaagcgtatccagagcagtggcaatccatcgtcgaagccaataaccagcgtccgccaatgtggctgcgtattaatcgtacgcatcattcccgcgacagctggcttgcattgctggatgaagcaggaatgaaaggtttcccgcatgcggattaccctgatgctgtacgtctggaaacacctgcacctgttcatgcgctacctggttttgaagacggatgggttaccgttcaggatgcaagtgcacaaggttgcatgacctggcttgcgccacaaaacggtgaacacattttggatctttgtgccgcccccggcggtaaaacaacgcatatccttgaggtggcaccagaagcgcaggttgttgcggttgatatcgacgaacagcgcctctctcgggtttacgacaatttaaaacgccttggtatgaaggcgaccgtgaaacaaggtgatggccgttacccttctcaatggtgtggcgagcaacagtttgatcgcattttattagatgcgccttgtagtgcaaccggtgtgattcgtcgccatccagatattaaatggttacgtcgcgatcgcgatatcccggaactcgcgcaattgcagtctgaaattctcgacgccatttggccgcatttaaaaaccggtggaactctggtctatgccacctgtagcgtgttaccggaagagaatagcctgcagattaaagcctttttgcaacgtaccgctgatgccgaactttgcgaaacaggaacaccagagcaaccgggtaaacaaaatctacctggtgccgaagagggcgacggcttcttttacgctaagctaatcaaaaagtgatgagataacgggtcgcgactgatgaaaattatcattctgggtgccggccaggttggcggcacactggcggaaaacctggttggcgagaacaacgatattactgttgtcgataccaacggtgagcgtctgcggaccttacaggataaatttgacctgcgggtcgtgcaggggcatggctctcatccacgcgtattgcgggaggcaggtgccgacgacgccgatatgctggttgctgtaaccagtagtgatgaaaccaatatggttgcctgccaggtagcctacagtcttttcaacacccctaatcgcatcgctcgtatccgcagtccagactacgtgcgcgatgccgataagctatttcatagtgatgctgtgccgattgatcatctgatcgcaccagagcagttggttatcgataatatttaccgactgattgagtatcccggcgcattgcaggtggtgaacttcgctgagggtaaagtcagcctggctgtggttaaagcctattatggcggcccgctgattggtaatgcacttagcaccatgcgcgaacatatgccacatatcgatactcgtgtggcagcaattttccgccacgatcgccccattcgtccgcaaggtagcaccattgttgaagctggtgatgaagtgttctttattgccgctagtcagcatatccgcgcggtgatgagtgaattacagcgactggaaaaaccgtataagcggatcatgctggttggtggcggtaatatcggtgcagggctggcgcgtcgtctggaaaaagattacagcgttaaactcatcgaacgtaatcagcagcgcgctgccgaactggcggaaaagttacagaatacgatcgtcttttttggtgatgcgagcgatcaagaactactggccgaagaacatatcgatcaagttgatctgtttattgccgtcaccaacgatgacgaggccaatatcatgtccgccatgcttgccaaacgtatgggtgcgaaaaaggtgatggtattgatccagcgtcgcgcttatgtggatctggttcaggggagcgttatcgatattgcgattagtccacaacaagcaactatttctgcgttgcttagccatgtgcgaaaagcagatattgttggtgtttccagtttgcgccgcggcgtagcagaagctattgaagccgttgctcacggtgatgaaagcaccagtcgcgttgtcggcagagtcattgacgaaatcaagctaccgccaggaacgattattggagcggtggtacgtggaaacgacgtgatgattgccaatgacaatctgcgcattgagcaaggcgatcacgtaattatgttcctcacagataaaaagtttattaccgacgtcgaaagactcttccagccaagccctttcttcttgtaattaataaggcgtctaatgacgccttattatttccctttgattatcaaggattaattaaattcattcctggcaggaaaatggcttaacatttgttagacttatggttgtcggcttcatagggagaataacatgagcattattaaagaatttcgcgaatttgcgatgcgcgggaacgtggtggatttggcggtgggtgtcattatcggtgcggcattcgggaagattgtctctagtctggttgccgatatcatcatgcctcctctgggcttattaattggcgggatcgattttaaacagtttgctgtcacgctacgcgatgcgcagggggatatccctgctgttgtgatgcattacggtgtcttcattcaaaacgtctttgattttctgattgtggcctttgccatctttatggcgattaagctaatcaacaaactgaatcggaaaaaagaagaaccagcagccgcacctgcaccaactaaagaagaagtattactgacagaaattcgtgatttgctgaaagagcagaataaccgctcttaacaagcgccactaagcagaagaccagtggtaaaaaagtgatttactttcttgccactggcctcccagttcccccgattgccatgttttccttttcgcatgtaactgcctttccccttcttatttttctctacgcgctgtcggaataagggatcatgtagtaatgcttctatcgcattatcctttatctgccctttagtatgctgatatcgactcataaaaactccagttggttatttaacggcgcgagtgtaatcctgccagtgcaaaaaatcaacaaccactcttaacgccactcgccccttgttcaagagcttcaagaatgctacaataaacactgctatgagcagtcccacaacaggcatcgttaaggcgttgcaaggaacgctgcatactctgcaactcggctatccgtgcttcgacttcctgcaatctttcctgcacaatgcctttactctcctgacaggtatggtgttcaggatcgatgcggatgctcagcaactcgcggatgctctccagactgaaacctagttgtctggcatggcggataaatttcaatcgctggagatcgctttcggtatataggcgaaacccaccttcagtacgcacttcatgctccatcatctgctgtttttcgtaataacgaatcgtgtcgggtgttacttccgccatttttgccagctcaccaatgcgatacatacatactccattagttatcgttgattttgtccaacaacttgtcagcataatcgccgcgtaaaaaatcggtactcaatccagcttgtcgcagcttcaattccagtaaactcaatcgacggctaacctcttgatattgcggatcatcgtgacggatacctttgagaatatccagaagctgaattgcttctctccgttgctcaagttctggcggtaagcaaccggcattcttcagcaagcgataccccgcacgtaattccggtggcacgtgagaatcatcatccagtatcaatggttcgccgctacctgccaggttatcaaactcacctttcgcttgcgcttctgctatatggcgctctgcccactggtcaagtaaccacataaatactccaggggatgaacaaaaagagtacagctattgtagataagtggggatactacgggtataaaaaaacccgccggggcgggtttttttacgttgcttcagattactctgcagcagcttctgctttctcactacgatcaaccagctcgatgtaagccatcggcgcgttgtcgcctgcacggaagccacacttcagaatacgagtgtaaccaccggcacggctcgcgaaacgcgggcccagttcgttaaacagttttgccacgatctcgttatcacgagtacgggcgaatgccagacgacgattagcaacgctatcagtcttggcaagagtaatcagcggctcaactacgcggcgcagctctttcgctttaggcagagtcgtcttgatgatttcatgacgaaccagactacctgccatattgcggaacatagcctggcgatggctgctgttgcggttcagttgacgaccactcttacgatggcgcatgaccttatccttctcagtaaaaccttaacctgtgatccggttactcgtcagcgatgcttgccggtggccagttttccaggcgcatgcccagagacagtccacgggaagccagcacgtctttaatctcagtaagagattttttaccaaggttaggcgttttaaggagctcaacctcggtacgctgtaccagatcaccgatatagtggatagcttctgctttaaggcagttagcagagcggacagtcaattccagatcgtcaacagggcgcagcaggatcggatcgaactctggtttctcttctttcacttcaggctgacgtacatcacgtaagtcaacgaaagcttccagttgttcagccagaatggttgccgcacgacgaatcgcctcttcaggatcgattgtgccgttggtttccatttcgatgaccagcttgtccaggtcggtacgctgttctacacgcgctgcttcaacattgtaggcaatacgctccacagggctgtagcatgcgtcgaccagcagacggccgattgggcgctcatcttcttcgctatgaattcgggtagaagccggcacataaccacgaccgcgctgaactttgatacgcatgctaatagacgcgttctcatcggtcaggtggcagatcacgtgctgcggcttgacgatttcgacatcaccgtcgtgggtgatatcggctgcagtcacagggccaatgccagatttattcaaggtaagaataacttcatctttgccctgaactctcaccgccagccctttcaggttgagcaggatttccaggatatcttcctgaacgccttctttggtgctgtactcatgtagtacaccatcaatctcaacctcggtcaccgcgcaacccggcatgctactgagcagaatacggcgcagtgcgttacccagagtatggccaaagccacgctctaaaggctcaagggtcaccttggcgtgcgtgctactcacttgctcgatatcaaccaggcgcggttttagaaactctgtcacagaaccctgcattgtgtcctctctttggtactaagctttacttggagtaaagctcgacgatcaggtgttcgttaatgtccgcagacagatcagaacgctccggcttacgcttaaacgtaccttccatcttgccagcatcaacttccagccaggttggcttttcacgctgctcagccagctccagagcggctttcacgcgagactgcttcttcgctttctcacgaatgcttacaacgtcattcggactaacctgataagaagcgatgttaacaacacgaccgtttaccataattgctttatggctaaccagctgacgtgcttctgcacgagtggcaccgaagcccatacggtatacaacgttgtccagacgaccttccagcagagccaacaggttttcaccggtgttgcctttcagacgtgctgcttctttgtagtagttacggaactgacgctccagcacaccatagatacggcgaactttttgcttttcacgcaactgcacaccatagtcagacagacgcggtttacgcgcaccgtgctggccaggagcttgttcaattttacacttggtatcgatcgcgcgaacgccagacttaaggaataagtcggtgccctcacgacggctcagcttgagcttaggacccaaatatcttgccattttctttctccaacaaacctggaaaacgaggcgttatacgcgacgttttttcggcggacgacaaccgttatgagggatcggagtcacatcagtaatgttagtgatgcggaaacctgcggcgttcagagcacgaatagtagattcgcggcctggacccggacctttaaccataacttccagattcttgatgccgtattctttcacggcgtcagcgcaacgctctgctgcaacctgagctgcaaacggagtggatttgcgagaaccacggaaaccggaaccaccggctgttgcccaacccaacgcgttaccctgacgatcagtgatagtcacgatggtgttgttgaaagaagcatggatatgagccacgccgtcagagacttgttttcttacacgtttacgtgcacgaattggtgcctttgccattattcaatcaccccgattatttcttgatcggtttgcgcggacccttacgggtacgtgcgttggtcttggtacgctgaccgcgaaccgggagaccacgacgatgacgcaaaccgcgatagcaaccaagatccatcaggcgcttgatgctcatgctgatttcacggcgcagatcaccttcaacgacaaatttggcaacttcgtcacgcagcgtgtcgatttgtccttcagacagctcactgatcttaacatcttcagcgatacccgctgcagccaggatggctttagaacgggtcttgccgacgccataaatgctagttaatgcgattacggcatgcttatgatcaggaatgttaatgcctgctatacgggccactatgcactcctactatttaatatgtacgttccatgctgaaaagcccgttttcaggatactcaaatggaaacgcacagacatacaaaagattggctggctaatctagccagctcaacccaactttgcaagaaaaatatgcgaaaaaatcagccttggcgctgtttatgcttcggctcggcactgcaaatcacacggatgacaccatcacgcttaacgattttgcagttacggcataatttcttgacggaagcacgaactttcatttttactctccgtaacttctcgggcgaccaattatcggccgtagcctttcaggttcgccttcttcaatgcagactcatactgactggacatcatcagagtttgcacttgagccataaagtccataatcacgacaacaacgataagcagactggtcccaccgaagtagaacggtactttcattgcatcacgcatgaactccgggatcaggcagataaaggtaatatacagcgcaccaaccagggtcaggcgggtcattactttatcgatatacttcgccgtttgctctcccggacgaattcctggtacaaatgcaccggacttcttcaggttatctgctgtttcacgcgggttgaaaaccaacgccgtgtagaagaaacagaagaagatgattgcagacgcatagagtaacacataaagcggttgcccaggctgcaaatacaggctaattgttgtcagccagttccaaccagtaccgcccccgaaccaactcgcgatggtcgccgggaacagaataatactggaagcgaagattgccgggattacccccgccatattcactttcagcggtaaatgtgtgctctgtgcagcatagacacgacgaccttgctgacgtttcgcgtagtttaccacaatgcggcgttgaccacgctcaacaaatacaacaaagaacgtcactgcaaatactaatactgcaaccaacagcaacacgaggaagtgcaggtcgccttgacgcgcttgctcgatagtatgggcaatggctggcgggagtcccgcgacaataccggcgaagataatgatactaataccgttgccgatacctcgttcagtaatctgttcgcccaaccacatcaggaacatggttcctgtgaccagacttacaacagcggtgaagtagaatgcaaagcccgggttaatcaccaggccttgcataccaggcatattcggcagaccggtagcaataccgatgctctggaatattgccagcaccagagtaccgtagcgggtgtactggctgatcttacgacgaccagactccccttctttcttaatttctgccaacgttgggtgaaccaccgtcagcagctggataatgatgctcgcgctaatatacggcatgatccccagagcaaagatagaagcacggctgagagcaccaccagagaacatgttaaacatctcaatgatggtgcctcgctgttgctcaagcagtttggcaagtacagcggcatcaataccagggatcggaataaaagagccaatacggaacacaatcagcgcaccgataacaaacagcagtctgcgtttcagctcgcctaagccacctttggcactttgaaaatctaatcccggttgtttagccatctgctacttattcctcgattttaccgccagcagcttcgatagcagcacgagcgcctttagtaacacgcaggccacgaacagttaccggagtcgttacttcgccagccaggatcactttcgcgaactcgatctggataccgataatgttagccgctttcagcgtgttcaggtctactacaccgccttctactttagccaggtcagacagacgaatttcggctgtaatcgctgctttacgagaagtgaagccgaatttcggcagacgacggtacagaggcatctgaccaccctcgaaaccgcgacgtacgccaccgccagaacgagacttctgacctttgtgaccacgaccaccggttttaccgaggccagaaccgataccacgacccaggcgtttacccgcctttttggagccttcggccggagacagagtatttaaacgcatctcttactcctcaactttaaccatgaaggaaaccgcgttgatcataccgcgaatagcaggagtatcctcgcgctctacggtgtgaccaatacgacgcagacccaggccaagcagcgttgccttgtgtttcggcagacgaccgattgcactgcgggtttgagtaattttaatagtctttgccatggtttatttccccagaatttcttcaacggatttaccacgcttggcagcgaccatttctggagaattcatattttccaggccatcaatagttgcacgaaccacgttgatcgggttggtggaaccataggctttagccagaacgttatgaaccccagcgacttccagaacggcgcgcattgcaccaccggcgatgataccggtaccttcggaagccggctgcatgaatacgcgagaacccgtgtgaacacctttaacagggtgttgcagagtgccgttattcagcgcgacgttaatcatattgcgacgggctttttccatcgctttctggatcgctgctggaacttcacgcgctttaccgtaaccaaaaccaacgcgaccgttaccatcgccaactacagtcagagctgtgaaggagaaaatacgaccacctttaacggttttagatacgcggtttaccgcgatcagcttttcctgcagttcgccagcttgtttttcgatgtgagccatcttacacctctaccttagaactgaaggccagcttcacgggcagcatctgccagtgcctggacacgaccatgatattggaacccggaacggtcaaaggatacatctttgatgcctttttccagagcgcgttcagcgacagctttacccacagctgcagccgcgtctttgttaccggtgtacttcagttgttcagcgatagctttttctacagtagaagcagctaccagaacttcagaaccgttcggtgcaattacctgtgcgtaaatgtgacgcggggtacgatgtaccaccaggcgagttgcgcccagctcctggagcttgcggcgtgcgcgggtcgcacgacggatacgagcagatttcttatccatagtgttaccttacttcttcttagcctctttggtacgcacgacttcgtcggcgtaacgaacacccttgcctttataaggctcaggacgacggtaggcgcgcagatccgctgcaacctggccgatcacctgcttatcagcgcctttcagcacgatttcagtctgagtcggacattcagcagtgatacccgcaggcagctgatggtcaacaggatgagagaaacccagagacaggttaatcacattgcctttaaccgctgcacggtaacctacaccaaccagctgcagcttcttagtgaagccttcggtaacaccgataaccatactgttcagcagggcacgcgcggtaccagcctgtgcccaaccgtctgcgtaaccatcacgcggaccgaaggtcagggtattatctgcatgtttaacttcaacagcatcgttgagagtacgagtcagctcgccgtttttacctttgatcgtaataacctgaccgttgatttttacgtcaacgccggcaggaacaacgaccggtgctttagcaacacgagacattttttcctccgattaggctacgtagcagataatttcgccaccaagaccagcctggcgcgctgcacgatcagtcataacacctttagaggtagaaacaactgcgatacccagacccgccataactttcggcagctcatctttacgtttatagatgcgcagacctgggcggctgacacgctgaatgctttctacaacagctttgccctggaaatacttcagagtaagttccagttcaggcttggtgtcgccttcaactttaaaatcttcaataaaaccttcttccttcagcacgttggcgattgccactttcagcttggaggaaggcatggtgaccgcagctttgttcgcggcctgaccgttacggatacgggtcagcatatccgcgatcggatcttgcatgctcatctgtctttactcccgtgattcaattggtgacaattaccagctagcctttttcagacccgggatttcaccgcgcatagcggcttcacggaccttaatacggctcaacccgaacttccgcaggaaaccatgcggacgacctgtttgacggcagcggttacgctgacgagacgggctggaatcacgcggcagagtctgcagcttgagaacagcgttccaacgatcttcgtcggaagcgttcacatcagagatgatcgctttcagttcagcgcgtttcgcgaagtatttatcagctaaagctacgcgttttacttcgcgtgctttcatactttgcttagccatttagtaaccctaccttacttgcggaacgggaagtcaaaggcagccagcagagcgcggccttcttcgtcagatttcgcagtagtggtaatggtaatatccaaaccacgaacgcggtcgactttatcgtagtcgatttctgggaagatgatctgctcacggacacccatgctgtagttaccacgaccgtcgaaagacttagcggacaggccacggaagtcacggatacgaggtacagcaatagtgatcaggcgctcaaagaactcccacatgcgttcgccacgcagagttactttacagccgatcggatagccctgacggattttgaagcctgcaacagatttgcgtgctttggtgatcagcggtttttgaccggagattgctgccaggtctgctgctgcgttatccagcagttttttgtcagcgatcgcttcaccaacacccatgttcagggtgatcttctcgacccgagggacttgcatgacagaattgtagttaaactcagtcatgagttttttaactacttcgtctttgtagtaatcatgcagtttcgccatcgtactactccaaattacttgatagtttcgctgttagacttgaagaaacggacttttttaccgtcttcgaatctaaagcctacacggtcagccttgccggttgccgcattgaagattgctacgttggaaacctgaatagcggcttctttttcaacgatgccacccggttggttcagggccggaaccggcttctgatgtttcttaaccaggttgataccttcaacaatgaccttgccggaagacaggacattcttaactttaccgcgtttacctttatctttaccggttaacacgataacttcgtcatcacgacggattttcgctgccatgattcgctccttagagtacttctggtgccagagagataattttcatgaacttctcactacgaagctcacgagttaccggcccaaaaatacgcgtaccgataggctgctcgctgttgttgttcagaagaacacaagcattaccatcgaagcgaatgacagaaccgtccgggcgacgaacacccttcttggtgcgcaccactaccgccttcagcacatcaccttttttgaccttaccacgcggaattgcttctttgatggtgatcttgatgatgtcgcctacgcctgcgtagcgacggtggctgccacccagaaccttgatacacattacgcgacgtgcaccggagttgtcggcgacgttcagcatagtctgttcttggatcattttagtgctccgctaatgtcaactactactgagacccgaaaatcaggtcgttaaaaatccccatatcgagggcgcggcattataacaccgcttcaaggatatgggtagaaaaaataaacggctcatttctgagccgtttattcgtattgagagagtgtactgtattacagaaccgctttctctacaacgcgaaccagcgtccaggatttagtcttggacagcggacggcattcgcggatttcaaccacgtcaccgataccgcattcgttgttctcgtcatgtacgtgcagtttggtcgtacgcttgatgaatttaccgtagatcgggtgtttcacaaaacgttcgatagcaacaacaatggatttctccattttgtcgctaacaacgcgaccttgcagagtacggattttatcggtcattacgcacccgccttctcgttcagtaaagtcttaacgcgtgcgacatcgcgacgcacttgcttcaacaggtgagactgttgcagctggccacttgcagcctgcatacgcaggttgaactgctcacgcagcaggttcagcagctcggtgttcagctcttcaacgctcttctcacgcagctcttttgctttcattacatcaccgtcttagttacaaaggtggttttaatcggcagtttcgctgctgccagcttgaatgcttcacgggccagctcttccggaacaccgtccatttcatacaggactttacccggctgaatcaaggcaacccaatactccacgttacctttacctttacccatacgcactgccagcggcttttcagtgatcggtttgtccgggaacacacggatccagatcttaccttgacgcttaactgcacgggtcatagcacgacgtgctgcttcgatctgacgggcagtcagacgaccacggccaacagctttcagaccgaagctgccgaagctaacatccgtaccctgcgccagaccgcggttacggcctttgtgcattttacggaattttgtacgctttggttgtaacatcagcgacgctccttatttacggcctttacgctgctgctttttaggctgagcagccggtttttccggttgttcaacagcagccataccacccaggatctcgcctttgaagatccacactttaacgccgattacaccgtaagtggtgtgcgcttcagaggtgttgtagtcgatgtcagcacgcagagtgtgcagcggtacgcgaccttcgcggtaccattcggtacgtgcgatttccgcgccgcccagacggccgctaacttcaactttaatacctttagcgcccagacgcattgcgttctgtacagcacgcttcatagcacgacggaacataacgcgacgttccagctgagaagtgatgctgtcagcaaccagttttgcgtccagttcaggcttacgaacttcggcgatgttgatctgtgcaggaacgccagcgatgtccgctacgaccttacgcagtttttctacgtcttcaccttttttaccgataacgatacccgggcgagcagtgtgaatggttacacggatgctcttagccggacgctcgataacgatacgagatacggacgctttagccagttccttagtcaggtactgacgtactttaaaatcgctgtccaggttgtcagcgaattctttggtgttcgcaaaccaggtagagttccatggttttacaatacccaggcgaataccattaggatgtactttctgacccattgctagtctccagagtctcagcgatcggacacaaccacagtgatgtggctggtgcgcttcaggatgcgatctgcacgaccttttgcacgcggcataatgcgcttcatgctcgggccttcgtctacgaaaattttcgtaactttcagatcgtcaatgtcagcgccatcgttgtgttcagcgttagcaatggcagattccagaactttcttgaccagtacagccgctttcttgttggtgtaggtcaaaatatccagagcctggctcactttcttaccgcgaatcaggtcagcaacaaggcgaaccttctgagcagaagaacgagcatggcgatgtttagcgatagtttccatctcttcctcctaccttatttcttcttcgcttttttatcagcagcgtggccgcgataagtacgagtcggtgcgaattcacccagtttgtgaccaaccatttcgtcggttacaaataccggaacgtgctgacgaccattatggacagcgatggtcaaaccgatcatgttaggaaagatcgtactacgacgggaccaagtgcgcaggggcttcttgtctccgctttccaccgctttctctaccttcttcagcaagtgcaggtcaataaaaggacctttcttgagagaacgtggcatggcttatcctctaaaattatttgctacggcgacgtacgatgaatttatcagtacgcttgttgctgcgggtcttcttacctttggtctgaacgccccacggagttaccgggtgcttaccaaagttacgaccttcaccaccaccatgtgggtggtctaccgggttcatcgcggtaccgcgaacggtcggacgaacaccacgccagcgtgcagcacctgctttacccagaacgcgcagcatatgctcagcattgccaacttcgcccagagttgcacggcagtctgcttctactttacgcatttcaccagaacgcagacgcagggtgacataagcaccatcacgagcaacgatctgaacgtaagtaccagcggaacgtgccagctgaccgcctttacctggtttcatttctacgttatgaacagtagaaccaaccgggatgttgcgcatcggcagggtgttacctggtttgattgcagcatcaacgccagactgaatctggtcgccagctttcaggcctttaggggccaggatgtaacggcgttcaccgtctttgtacagaaccagcgcgatgttcgcggaacggttcggatcgtactcaagacgttcaacaactgccgggataccgtctttgttgcgtttgaagtcaacaatacggtaagcctgcttgtggccaccaccgatatgacgagtggtgatacggccattgttgttacgaccaccggatttgctgtttttttccagcaacggagcaaaaggtttgcccttgtgcagctcagggttaaccactttaactacgtggcgacgacccggagatgtcggtttacatttaacaactgccattgtattactcctccgacttactcagcgccgccaacgaagtccagattctggccttctttcagggtgacgtaagcttttttccagtcgctacgacgaccgatacgctgtccgtgacgtttaactttccctttaactaccagggtgttaacgacttcgacttcgacttcaaacagtttctgcacagcagctttgatttctgctttggtcgcgtctttagcaactttgagtacgatggtgttggatttttccatcgcagtagacgctttttcagaaacgtgcggtgcacgcagcaccttcagcagacgttcttcacgaatcatgccagcatctcctcaacttgcttaacagcatcagcagtcattacgactttgtcgaaggcgatcaggctaaccgggtcgataccagttgcatcgcgtacgtcaaccttgtgcaggttgcgcgcagccaggaacaggttttcgtccagctcaccggtgatgatcagcacatcttccagagccatgtctttcagtttctgtgccagcagcttagttttcggcgcttctacagagaacttctcgacaacgatcagacgatcctgacgtaccagttcggacaggatgcttttcagcgcgccgcggtacatcttcttgttaactttttgactgtggtcctgcggacgagcagcaaaggtcacgccaccagaacgccagatcgggctcttgatagaaccagaacgcgcacggccggtgcctttctggcgccacggttttttaccggaaccagttacttcagcacgagtcttctgagcacgagtaccctgacgagcaccagctgcataagcaacaacaacctggtgaaccagcgcttcgttgaaatcacgaccgaaggtagtttcggaaacagtcagcgcgctctgcgcgtctttcaatactaattccattgctatctccttacgccttcacagctggtttaacgatcaggtcgctaccggttgcacccgggacagcacctttaaccagcagcaggttgcgctcagcgtcaacgcgtactacgtcaaggctctgaacggttacacgttcgttacccatctgacctgccattttcttgcctttgaacactttgcccggagtctggttctgaccgatagaacccggaacgcggtgagacaaggagttaccgtgagtagcgtcctgggtacggaagttccagcgcttaacggtacctgcgaaacctttacctttagaggtgccagttacgtcaacttttttaacgtcagcaaacagttcaacgctaatgctctgacctacagtgaactcttcgccttcagccaggcggaattcccacagaccacggccagcttctacgccagctttagcgaagtggccagcttcaggcttggtcacacggttagcttttttagcaccggtggtcacctgaatagcacggtagccatcgttagccaggtctttaacctgagtaacgcggtttgcttcaacttcgattacggttactgggatagaaacgccgtcttctgtgaagatacgggtcatacccacttttttaccgactaaaccaatcattgtttcaacctctcaatcgctcaatgacctgattaacccaggctgatctgcacgtctacaccggcagccagatccagacgcatcagagcatcaacggttttctcggttggctcaacgatgtcaaccagacgcaagtgagtacggatttcgtactgatcgcgcgcgtctttgttgacgtgcggggagatcagaacagtgaagcgctctttgcgtgtcggcagcgggatcggaccacggacctgcgcaccagtgcgcttggcagtctcgacgatttccgcggttgcttgatcgatcagacgatgatcaaacgctttcaggcggatacggattctttggttctgcatgagaccagagctccaattattttataaacgaaaatgattactcctcagacccattacgattgatgggagagtgtaaccgttcttacgtagctccccgattgggagcattgttaggtagccaaattcggctaactgaggttcagattgaacctgctgtcaactacgacaagcccgcgcattatacatacttaaccaccgaacgcaagcgtattgctagtaaagtaaacagccttcgggttatctctcaagttcgttcagtgcatttttgacacgctctcttaaaccggctttctcttcgctttcttccacagtattttcttcgtcttcagaagaagagggggcattctcaaccgcgacgcctgggtcatcttcctcctcgacggattcgacgacggggagtggctgttttttgaagaaatagtgttgtgtactttgtttaaaagcgggcgtttcagcctctacagtgacttcggcttttactatccaaagcacccatagctgcctggcatacccaccaaccagcaccattcctgcaaaccacaggcaaatcagtaataaacaaattacatatattatggtgctgtgtttttgtcgggagaagataccagggtgacctgtttctttctgctcacgcgcggcgatatagaattcaaacattataatcccttgtgacgtaaaaactgcaaaacaaaagtcctacgcaggaattatttacgttttacgagaacccttcaatatgaattaaattacggcattaaaaataagaaaaaagcctgacaaatgaagcattttaaaaacagaaacattcatatttaaaatgttaaattgaattgatattttaaatatgaataatttattcgttctgacagtacgaataagatatgccgtcaacaaatgcaaaaagggcgccgaagcgcccttttcaattcaaaactaattaacgtgtaattagcccagaactttagcaacaacgcccgcgccaacggtacggccgccttcacggattgcgaaacgcagaccgtcgtccatcgcgatcgggtggatcagggtaacaaccattttgatgttgtcgcccggcattaccatctctacgccttccggcagttcgatggtaccagtcacgtcagtagtacggaagtagaactgcggacggtagcctttgaagaacggagtatgacggccgccttcatctttggacagaatgtacacttcagattcgaacttggtgtgcggcttgatggtgcccggcttagccagtacctgaccacgttcgatttcttcacgtttgataccacgcagcagaacacctacgttctcaccagcacggccttcgtccagcagtttgcggaacatttcaacgccagtacaggtagacttctgagtctctttgataccaacgatttcaacttcttcaccaactttgatgataccgcgttctacacgaccggtaacaacggtaccacgaccggagatggagaatacgtcttcgatcggcagcaggaacggcttgtcaatcgcacgctctggttccggaatataagaatccaggaagccagccagttccaggattttcgcttcccactctgcgtcgccttccagcgctttcagagcagaaccacgaacgatcggagtgtcgtcgcccgggaagtcgtactgagacagaagttcacgaacttccatttcaaccagttccagcagctcttcgtcatcaaccatgtcgcatttgttcaggaacacgatgatgtacggaacgcctacctgacgacccagcaggatgtgctcacgagtctgcggcatcgggccgtcagtcgcagcaactaccaggatcgcgccgtccatctgagcagcaccggtgatcatgtttttaacatagtcggcgtgccccgggcagtctacgtgtgcgtagtgacgggtcggggtgtcgtattcaacgtgagaagtgttgatggtgataccacgagctttttcttccggcgcgttatcgatctggtcgaatgcacgagcagcaccgccgtaggttttagccagtacggtggtgattgcagcggtcagagtagttttaccgtggtcaacgtggccgatagtaccaacgttaacgtgcggttttgtacgttcaaatttttctttagacacggctatattccttactatagtgctctccccttcaggagagagcacgggactttggtattaacccttaggcttatttaccacgggcttcaattacggcctgagcaacgttactcggcgcttcatcatacttcaggaattccatagtgtaacttgcacgacctttggtcagagaacgcagctgagttgcgtatccgaacatttcagacagcggtacttcagcgtggatcttaacgccagtaacttcagattcctgacctttgagcataccacgacgacggctcaagtcaccgataacgtcaccggtgttctcttccggagtttctacttcaaccttcatgatcggctcaagcagaactggtttcgctttcttaaagccttctttaaaggcgatagaagcagccagtttaaacgccagttcagaggagtcaacgtcatggtaagaaccgaagtgcagacgaatacccatgtctactaccgggtagcctgccagcggacctgctttcagctgttcctggatacctttatcaacggccgggatgtattcgccagggattacaccacctttaatgtcgttgatgaactcgtagcctttcgggttactacccggctccagcgggtacatgtcgataacaacatgaccatactgaccacgaccaccagactgtttcgcgtgtttaccttcaacatcggtaactttctggcggatagtttcacggtaagcaacctgcggtttacctacgttcgcttcaacgttgaattcacgcttcatacggtcaacgatgatgtcgaggtgcagttcgcccatacccgcgatgatggtctggttagattcttcgtcagtccatacacggaaagacgggtcttctttagccagacggcccagagccagacccattttttcctggtcagctttggttttcggttcaactgcgatggagattaccggctcagggaattccatacgttccagaatgatcggcgcatccgggtcacacagggtgtcaccagtggttacgtctttcagaccgatagcagcagcgatgtcgcccgcgcgaacttctttgatctcttcacgtttgttagcgtgcatctgaacgatacgaccgaaacgctcacgtgcagctttcacggagttcagtacggtatcaccagagttaaccacaccggagtaaacacggaagaaggtcaggttaccaacaaacgggtcggtagcgattttgaacgccagtgcagagaacggctcgtcatcacttgcgtgacgttcagccggagtgtctttaccgtcgtccaggataccgttgatcgcaggtacgtcaaccggggatggcaggtaatcaattaccgcatccagcatcgcctgaacacctttgttcttgaacgcagaaccacaggttaccaggatgatttcgttgttcagaacgcgctgacgcagagcacctttgatttctgcttcagtcagttcttcaccacccaggtatttttccatcagctcttcagaagcttcagctgcggattcgatcaggttctggtgccattcgttagccagttcaaccatgtctgccgggatatcttcgtattcgaaggttacgccctggtcagcgtcgttccagttgatagctttcattttcaccaggtcaacaacaccggtgaaatgttcttcagcaccaatcgccagctgcagcggaaccgggttcgcgcccagacgggttttgatctggttaacaactttcaggaagttcgcacccatgcggtccattttgttaacgaacgcaatgcgcggaactttatatttgtttgcctgacgccatacggtttcagactgcggctgaacaccaccaactgcgcagtaaaccattaccgcaccatcgagaacacgcatggaacgttctacttcgattgtgaagtcaacgtgccccggggtgtcgatgatgttgatgcgatgcggctcatactgcttagccataccagaccagaatgcagtagtcgcagcggaagtgatggtaataccacgttcctgctcctgctccatccagtccatggttgcagcgccgtcatgaacttcaccgattttatggtttacaccggtgtagaacagaatacgttcggtagtagtggttttaccggcgtcgatgtgcgcactgataccgatgttacggtagcgtgcgatgggtgttgtacgagccatttgtttcctcgtttatcttttaggcgttcaatttaagtagcccaaagcgggctgcttactggaagcgcccgcctggtgactaaaactccgaagggataaccaacggtagtgtgcgaacgccttgttggcttcggccatacggtgaacgtcttcacgtttcttaactgcagtacctttgttttctgcagcatcagaaagttcgttcgccaggcgcagagccatggatttatcaccgcgtttacgagcagcttcaacgatccaacgcattgccagagcattacgacgaaccggacggacttcaactggtacctgataagtagaaccaccaacgcggcgagacttaacttctacagtcgggcgcacgttttcgagagctacttcgaatgcttccagttcagatttaccagagcgctgagccagggtctccagcgcgctgtatacgatagattcagcagtagattttttaccatctaccatcaggatatttacaaatttagccagcagttcacttccgaacttcggatccggcagaattttacgctgaccaatgacgcgacgacgtggcatggaaatactccgttgttaattcaggattgtccaaaactctacgagtttagtttgacatttaagttaaaacgtttggccttacttaacggagaaccattaagccttaggacgcttcacgccatacttggaacgagcctgcttacggtctttaacgccggagcagtcaagcgcaccacgtacggtgtggtaacgaacacccgggaggtctttaacacgaccgccacggatcaggatcacggagtgctcctgcaggttgtgaccttcaccaccgatgtaggaagtcacttcgaaaccgttagtcagacgaacacggcatactttacgcagcgcggagttcggtttacgaggagtggtagtatatacacgagtacatacgccacgtttttgcgggcatgcttccagcgcaggcacgttgcttttcgcaactttgcgagcacgtggtttgcgtaccagctggttaactgttgccattaaatagctcctggttttagcttttgcttcgtaaacacgtaataaaacgtcctcacacaatatgaggacgccgaattttagggcgatgccgaaaaggtgtcaagaaatatacaacgatcccgccatcaccaggccatctggctggggtgcttaaccgtaagtctgacgaaatcagtatagtcaatgagaatgatgtcgttgctaatttgaccagtcaaaccgcgggcaataaggtcttcgttcagggcatagaccttaatgggggcattacgcagactttcaaggtagcggttaccgtcaactgcggcagttacgccatcttgcaataatagcagttcgtctccttcactgagcagacgcagcagcgcagcaaaatccgtcagccagggactgcgatgtaatgtgtgcagcataaacgcctcaaaacctcaaaataacatcgtagttggcgagttcgcggcgtaaggcatctgcttcgagcggcgtggcttcgacaacaaagggtgtctgcggatctaacccgcgttcgcgcagactagccgcacaaacccagcactgttcaatgtcgtacagacccaacaatttaaaagtggcaatgtaatcacgcgccagcactgcatcgggcttttgtcctggcagcagctgaaaaacgccatcagctataaagaagacagccagatcgtcagttaatgcggaagttgccagtaaagcatctaaaccttcccggcctgcggctgtaccatgaggtgcagtagaaaaaacaaacgcaattcgtttcatcagaactgtaccaccctgtcacaggtcaggctggcttccgccagcgccccaagtccgcttaaggtaaatccctgctgaaggttactgctagccagccccagtcttccggcctccgtttcatcaacaacgccacggcgtaatgctgccgctacgcagatattcagcgccacaccatgttgcgcattcagttgttgccaggcccgtacgaggtcaaattcgtcacttgccggagaggtcaattggttagcgttatagaccccttcccgatagaaaaagacgctgcttaactcatggccatctgctatcagcgcctgcgcaaactgaaaagcactactcgcctgttgcgtaccgtatgctggcccggtcaccacgatggcaaaacgcattacttatcttgcccctggaaatcaccgctcttgaactggcggatgtagagatagacagtgtgtttggagatgttcaggcggtcagcaacctggttgatcgcatctttaatatcgaagatccctttctcgtagagattcagcacgatctgacgatttttggcgttattagaaacattgcgatcggcattcacttcttcgatggtgaactccagcgtttgggtaaccagatcttcaacagaagaggcaaagttgacgctactaccgacatccggggtttctggcggcacaaaggtgctcataatctggctgaagggaacatcaagattcatattgatgcacagcagaccaattacacgctgttcgcggttacgaatcgcgatagtcagggacttcattaatacgccgcttttggcgcgagtaaagtagcatttagaaacgctgctatccgctcccgtcatatcgtgcagcatacgtagcgccaggtcagtaattgggctaccaatcttccggcctgtatgttcaccgttagcaatgcgaatggcactacattttagatcctgcaaagagtgcaaaacgatttcacagtgggagccaataagcatcgctaacccgtccaccaccgcttcgtaggatttcagaatatcaaaatcggtctggtcgaaaggacgttgatccagtaaatccaactcactggtttcgttggttaaaaggctcctggacatgaaaaaaaacactccttttcaggagcctgtcgttaacttttcagggcaggctcattaatgatgcgggtaactaaattaatacagcggaggttccgctttccagcactaattatatccggcctgtaataaaaaaaccgccgcctggtcaggcggcggttcttaatgcttattttttagcagaatctgcggctttcgcatcagcttccggctttgcatcagccttcggcgctggtttcacatccagcagctctacgtcaaacaccagggtagaattcggtgggatccccggaacacccgctttgccgtaagccagttctggtggaataaccagtttgatcttaccgcctttcttgatgttcttcagaccttctgtccaacccgggataacaccgtccagacggaaagaaagcggttcaccacgggtgtaagagttgtcgaactctttaccgtcgatcagcgtacctttgtagttcactacaacagtatcgctgtctttcggtgcttcgcctttaccggcttctactacctgataaaccagaccagtactagaggttttcacacctttctctttggcaaatttctcgcggtactctttaccttttgcttcgttatcagccgcgtctttttccatcttcgcctgagcagaagacttcacgcgagcttcgaatgcttgtagagtctgttcgatctcttggtcggagagtttgcttttatcagcaaatgcatcctgaacaccagcgatcagctgatctttatccagtttgatgcccagtttttcttgttcttttagagagttttccatgtaacgacccaggctggcacccagtgcataagcacttttctgatcgtcatttttgaacgctgctttgctgtcagcagctgtagcaggttttgcagcttcagcagcaaaagtgattggtgcatgcagggcaacggccattgtggtcgccagcagcgttactttaaacagacttttcatccatatctccaggatcggggcatctcaccccagggttaactattatcagaagggtactataaagcgttgtcgaacaaatctacatacagacacgccctattatcatctattttcagactctttttgtttaaattagtttcgatgaccgcgaaatgagtgctgtctcgggcagcaaagttaagtagaatccgcggcgaccattcgacaaaagaggtgaatcatgcaggatttaagtttggaagcacgcctggcagagctggagagccgactggcttttcaggaaatcaccattgaagaactgaacgtcacggtgaccgctcatgaaatggagatggcgaaactgcgcgatcatctgcgtctgctgaccgagaagttaaaagccagccagccgagcaacatcgcgagccaggctgaagaaacgccaccgccacattattgaggcgtaaaaaaagcggggattccccgcttttttgtcactttttcggtattagtggcaaccgcaaccgccgttgcctttaccgccacagcagccttcgccaccgtgttcatgaccgtgatcgtggccatgaccgccgcagcaaccgtcgtggtcgtgatcgtggtggtgatcgtgcgcgccgtgaacgtgaccatgagccagttcttcttcagtcgcttcgcgaatcgccacaacttcaacgttgaatttcaggttctgaccggccagcatgtggttaccatcaaccacgacgtgatcgtcttcaaccgcagtgatttcaaccggtaccggaccctggtcggtttcagccaggaaacgcatacctacctgcagttcatcaacgcccataaatacgtctttaggaacacgttgcaccaggttttcgtcgtactgaccgtaagcgtcgttcgcgccaacagcgacatcaaatttgtcgccaacttcatgaccttccagcgccgtttccaggccagagatcagggaaccgtgaccatgcaggtagtccagcggcgcactcaccggagactcatcaaccaacacaccgtcttctgtacgtacctgataggccaggctgaccaccaggtcttttgctactttcatgatatctcctgagcatgggaagaatagtggcgcagattgtagcggaattctgcagccgtgtactcactagcttaaaaaaactcggcgcatatcgttagtccggatgaaaaatcccgatcacttgctcatctttgcgaacgtgatcgcgggcttctttgtctgcttctcgcatctgatgtccgcacttaacacattcaacaatatcaatattattttcgcgccacatcgccatactatcctgcgcctgacaggccgggcattttgcgcccgcaataaaacgttttcggattgccatctttaccctttactcaaattcatcccagccgtccagctggcgtcgttcttgttgcatttcacgctggaaaatctcttccagttcgcgtcgggcttccctggcgcgagaaatttgtacggtatcggcatgcattgggatgagctctcgcagcatccgcatatccaggcggcgaaaatgcagttgcgctcgctgtgcctgatgcggatgcatgccaagcgtgaccagcgtcttgcgccccagctctaacgcactggagaatgtttcacgggaaaactgcgtcacccctgcctgtaataactcatgcgcttccacacgtccgcgcgctcgcgcaagaatatgcaaatgcggaaagtgctgttggcatatttccaccagcttcatggtgtcttccggctcgttacaggtaatgacgatagactcagcggcctctgcacccgcagaacgtaaaagatcgacctgcgtggcgtcgccgtaataaactttgtagccgtatttacgcatcaggttaacggcgctgatatcccgctccagcacggtaatgcgcattttatttgccatcagcaaacgaccaatcacctgaccaaaacgcccgaagcccacgacaatgacctggggtttatcatcgttgacccacggtttttcgtcttcttcttccggtccgttaaactggcgggatagccatttatccaccagcttcatcagcaacggcgtggtcatcatggaaagcgtcaccgtcaccagcaacaacgccatctggtcgccctggaataagcgttgactagaagcggtagaaaagaggacaaaggcaaactcaccaccctgactcaacacgccagcaaactgcatccgctcactgctacgcacgccatacaatcgcgccagcagatacagcacgagaattttcaccgccaccagcacaaccacgcttatcactacccacaacagatgggtataaagcaccccgaggttgagactcatgccgacagagataaagaacaaaccgagcagcaagcctttgaagggatcgatagccgtttccagttcatggcgatattcactttccgccagcagcacgcccgcaataaatgtaccgagcgccatgctcagccccagcgcatccataaacaatgcggaacccaacaccagcagcagcgtcgcggcggtgaacacttcccgcacgccagaagctgcaataaagcggaataccggacgcagtaaatagcgcccaccaatcagcatgccgacaaacgccagcaccttcatgccgaccttcatccagtcgaaatgttcgtctgcgctccccgccaacaacggcactaacgccagtgctgggattactgccagatcctgaaacagcagaacgctaaacccgagctggccggattcgctgcgattcatccctttctcacgcatcaattgcaacgccattgcagtactagacatcgcaaggccaatgccaccgaccaccgccgcctgccaggcgaaatccgtcagcatcaataatcccgccagcaacgccgcgcttaacagcacctgtgccgcgcctacgccaaaaatgctacgccgcagttgccaaagtttggagggattcaactcaaggccgatgataaacatcaggaataccacgccgagttcgctaaagtggaggatctcatcgacgtcgctaataaaccccagcccccacgggccaattgcaatccctgccagcaaatatcccaacacagcgccaatacccagccggcttgccagcggcaccgcagccaccgccgcgaagagaaacagcactcctgcgagtaaaaaatcggaaccttccatcagcggcctcctggagacagcggatttgccagccagtcaccgtaggctctggcgtggctcgccagctcctgtgcgctttgccgtctcgcccagtaaataatgatgggacttaaccaatgcatccggcacatgcccgccgccagttcaaaggggcgcagcacatcgctcatcgggtagcgattcagcgcgtcataacggtaagcactttccggctcgccggtggtaatcacgctacgccagtactttcccgccagttggtttcctcccggcccgctggcaaaaccacgacttaatacccggtccagccactctttcagtagcgccgggcagctataggtataaagaggatgctgaaagacaatcacctcgtgctcgcgcagtaatgcctgctcacgggggatatcaataaaaaaatcgggatagtgcgcgtaaaggtcgtgcacggtaacattgctgagctgcgtggccggtttaagcagtacccggtttgccacgctgtcctgagattccggatgggcatacagcagcaaaactttcgctggctgagacatcatccccctcccggtatggtttttgtgtatagtcgctgttttgggctaccattgcgcccggtgcggcagctcgcccatacattacattatcataatgataagttaacatagtctgaacatacggcaccttatgattgttttctccagcttacaaattcgtcgcggcgtgcgcgtcctgctggataatgccaccgccaccatcaaccctgggcagaaagtcggcctggtgggtaaaaacggctgtggtaaatctaccctgctggcattgctgaaaaatgaaatcagcgccgacggcggcagctacacctttccgggaagctggcaactggcgtgggtgaatcaggaaacgccggcgttaccgcaagcggcgctggaatatgtcattgacggcgaccgtgaatatcgtcaactagaagcgcagctacacgacgccaacgaacgtaacgacgggcacgccattgcgaccattcatggcaagctggatgctattgacgcatggagtattcgctcccgtgctgccagcctgctgcacggcctcggtttcagcaatgaacaactggagcgcccggtaagtgatttttccgggggctggcgtatgcgtcttaaccttgcccaggcgctgatttgccgtagtgacttgctgctgctcgacgaaccgactaaccacctcgatctcgatgccgttatctggctggaaaaatggctgaagagctatcagggcacgctgatcctgatctctcacgaccgcgacttcctcgatccgatcgtcgataaaattattcatatcgaacaacaaagcatgttcgagtacaccggcaactacagtagctttgaagtacagcgcgccacccgtctggcgcagcaacaagcgatgtacgaaagccagcaggaacgcgtagcgcatctgcaaagttatatcgaccgtttccgtgccaaagccaccaaagcgaagcaggcccagagccgcattaagatgctcgagcgtatggagctaattgcccccgcgcacgtcgacaacccgttccgctttagcttccgcgcgccggaaagcctgccaaatccgttactgaagatggaaaaagtcagcgcgggctatggcgatcgcattattctcgacagcattaaactgaacctggtgcccggcagccgtattggtctgttaggccgcaatggcgcgggtaaaagcacattaatcaaactgttagccggtgaacttgcgccagtcagcggtgaaattggtctggcgaaagggatcaaactcggctacttcgcccagcatcaacttgaatacctgcgcgccgacgaaagtcctattcaacatctggcacgtttagcgccgcaggagctggaacaaaaactgcgtgactacctcggcggctttggtttccagggcgataaagtaaccgaagaaacgcgccgcttctccggtggggaaaaagcccgcctggtgctggcattaattgtctggcagcggccgaatctgctgctgctcgacgaaccgactaaccaccttgacctcgacatgcgtcaggcactcaccgaagcattaatcgagtttgaaggcgcgctggttgtcgttagccacgaccgtcatttgctgcgttccaccactgacgatctctacctggttcacgatcgtaaagtcgaaccgttcgacggcgatctggaagattatcaacagtggttgagcgacgtacaaaagcaggaaaaccagaccgacgaagcgccaaaagagaatgcgaacagcgcccaggcacgtaaagatcagaagcgtcgggaagctgagctgcgtgcgcaaacccagccactgcgtaaagagattgcccgtctggaaaaagagatggagaagctgaacgcgcaactggcgcaggcggaagagaaactcggcgacagcgaactgtatgaccagagccgtaaagcggagttgaccgcctgcctgcaacagcaagccagcgccaaatccggcctggaagagtgcgaaatggcatggctggaagcccaggagcagcttgagcagatgctgctggaaggccaaagcaactgatggcgcagataacgacgaccgatgccaatgaattcagcagcagtgctgaattcatccccatgcgcggctttagcaattgtcatctgcaaaccatgctgccgcgtctgtttcgtcgtcaggtgaaattcaccccgtactggcagcggctggagttgcccgacggcgattttgtcgatcttgcgtggagtgaaaaccctgcacaggcgcaacataaacctcgtctggtggtgtttcacgggctggaaggcagtctcaacagcccttacgcccacggtctggttgaggcggcgcaaaagcgcggctggctgggcgtggtgatgcattttcgcggatgcagcggtgaaccaaaccgtatgcaccgcatttaccatagcggcgaaaccgaagacgccagttggtttttacgctggctgcaacgcgaatttggtcatgcgccaacggctgccgtcggctatagcctcggcggtaatatgctggcctgtttgctggcaaaggaaggcaatgatctcccggttgatgcggcggtgattgtctctgcgccgtttatgctggaagcctgtagctatcatatggaaaagggcttttcccgcgtttatcagcgttacttgctgaacctgttaaaagccaatgccgcgcgcaagctggcagcctaccccggaacgctgccgattaatctcgcgcagttaaaaagcgtacgtcgcatccgtgaatttgacgatctcatcaccgccagaattcacggctacgccgacgctatcgactattatcgtcagtgtagcgccatgccgatgctgaaccggatcgccaaaccgacgctgattattcacgccaaagacgatccgtttatggatcatcaggtgatcccgaaaccggaaagtctccccccgcaggtggagtatcaactgactgaacatggcggtcatgttggctttattggcggtacattacttcatccgcaaatgtggctggagagtcgcattcctgactggttaacaacgtatctggaggcgaaaagttgttgatattaacgtatctggaggcgaaatcatgttgattccgtggcaagacctctcccccgaaacgctggaaaatttaattgaaagctttgtgttacgtgaaggcaccgattatggtgaacatgagcgtacacttgaacagaaagtcgccgacgtcaaacgccagctacagtgcggagaagcggtgctggtatggagcgagctgcacgaaacggtcaatattatgccgcgcagtcagtttcgcgaataacctgcaaccgtcggcggacgagataataatgatagctaagtcatggagttactatgtctgccaaacatccggtcattgcggtaacaggatccagcggcgcggggaccaccaccaccagcctcgcgtttcgtaaaatattcgcgcagttaaatctgcatgcagctgaggtggaaggcgacagttttcaccgttacacccgcccggaaatggacatggcgatccgcaaagcgcgcgacgccgggcggcatatcagctacttcggccccgaggctaacgacttcggcctgctggaacaaaccttcattgaatacggtcagagcggcaaagggaaatctcgcaaatatctgcatacctacgacgaagccgtaccgtggaatcaggtaccggggacattcaccccctggcaacctttaccggaacccactgatgtactgttttatgaaggtttacacggcggcgtagtcacgccacagcataacgttgcgcagcatgtggacttactggtcggcgtggtgcctatcgttaaccttgagtggattcaaaaactgatccgcgacaccagcgagcgcgggcacagtcgagaagcagtgatggacagtgtagtgcgtagtatggaagactatatcaactacatcacaccgcagttttcccgcacccatcttaacttccagcgcgttcccaccgtcgacactagtaacccgttcgcggcaaaaggtatcccgagcctcgatgaaagctttgtggtgatccattttcgtaatctggaagggatcgatttcccctggctgctggcgatgttgcaaggcagtttcatttcccacatcaatacgttagtggtaccgggcggcaaaatgggtctggcaatggaattaattatgctgccgctggtgcaacgattgatggaaggaaagaaaatcgagtaactctgctattacgccggataaaatactatccggcttcacaacgggatagttaagtcacgcggcaaccacttcatagctgtgagtaatattcaccgctttttccagcatcaacgccacactacaatatttctcggcagagagatcaaccgcacgcgcaaccgctgcgtctttcaggtcgcgaccggtgacgataaaatgcagattaatgtgcgtaaacaggcgtggtgcctcttcgcggcgttcagaggtcaattttacttcacaatcgaccacatcctgacgccctttttgcaggatgctaaccacatcgatggcactgcaaccacccgccgccatcaacaccatttccatcggacttggtgctttatcgccactgttgccgtccattaaaatctgatgaccagaggcggattcgcccagaaaagttaacccttcgacccacttcactcgcgcttgcatttttgctactccactgcgtcaattttcctgacagagtacgcgtactaaccaaatcgcgcaacggaaggcgacctgggtcatgctgaagcgagacaccaggagacacaaagcgaaagctatgctaaaacagtcaggatgctacagtaatacattgatgtactgcatgtatgcaaaggacgtcacattaccgtgcagtacagttgatagccccttcccaggtagcgggaagcatatttcggcaatccagagacagcggcgttatctggctctggagaaagcttataacagaggataaccgcgcatggtgcttggcaaaccgcaaacagacccgactctcgaatggttcttgtctcattgccacattcataagtacccatccaagagcacgcttattcaccagggtgaaaaagcggaaacgctgtactacatcgttaaaggctctgtggcagtgctgatcaaagacgaagagggtaaagaaatgatcctctcctatctgaatcagggtgattttattggcgaactgggcctgtttgaagagggccaggaacgtagcgcatgggtacgtgcgaaaaccgcctgtgaagtggctgaaattagctacaaaaaatttcgccaattgattcaggtaaacccggacattctgatgcgtttgtctgcacagatggcgcgtcgtctgcaagtcactagtgagaaagtgggcaacctggcgttcctcgacgtgacgggccgcattgcacagactctgctgaatctggcaaaacaaccagacgctatgactcacccggacggtatgcaaatcaaaattacccgtcaggaaattggtcagattgtcggctgttctcgtgaaaccgtgggacgcattctgaagatgctggaagatcagaacctgatctccgcacacggtaaaaccatcgtcgtttacggcactcgttaatcccgtcggagtggcgcgttacctggtagcgcgccattttgtttcccccgatgtggcgcagactgatttatcaccccgatatcaactatgcacttcgacaaacgctggtgctatgtttgcccgtggccgttgggttaatgcttggcgaattacgattcggtctgctcttctccctcgttcctgcctgttgcaatattgcgggccttgatacgcctcataaacgttttttcaaacgcttaatcattggtgcgagcctgtttgccacctgtagcttgctgacacagctactactggcaaaagatgttcccctgccctttttgctgaccggattaacgctggtacttggcgtcactgctgagctggggccattgcacgcaaaattgcttcctgcaagcctgctcgccgccatttttaccctcagtttggcgggatacatgccggtctgggaaccgttgctcatctatgcgttgggcactctctggtacggattgtttaactggttttggttctggatctggcgcgaacaaccgctgcgcgagagtctaagtctgctgtaccgtgaactggcagattattgtgaagccaaatacagcctgcttacccagcacaccgaccctgaaaaagcgctgccgccgctgctggtgcgccagcaaaaagcggtcgatctaattacccagtgctatcagcaaatgcatatgctttccgcgcaaaataatactgactacaagcggatgctgcgtattttccaggaggcgctggatttacaggaacatattagcgtcagtttgcatcagccggaagaggtgcaaaagctggtcgagcgtagccatgcggaagaagttatccgctggaatgcgcaaaccgtcgccgctcgcctgcgcgtgctggctgatgacattctttaccatcgcctgccaacgcgttttacgatggaaaagcaaattggcgcactggaaaaaatcgcccgccagcatccggataatccggttgggcaattctgctactggcatttcagccgcatcgcccgcgtgctgcgcacccaaaaaccgctctatgcccgtgacttactggccgataaacagcggcgaatgccattacttccggcgctgaaaagttatctgagtctaaagtctccggcgctacgcaatgccggacgactcagtgtgatgttaagcgttgccagcctgatgggcaccgcgctgcatctgccgaagagctactggatcctgatgacggtattgctggtgacacaaaatggctatggcgcaacccgtctgaggattgtgaatcgctccgtgggaaccgtggtcgggttaatcattgcgggcgtggcgctgcactttaaaattcccgaaggttacaccctgacgttgatgctgattaccaccctcgccagctacctgatattgcgcaaaaactacggctgggcgacggtcggttttactattaccgcagtgtataccctgcaactattgtggttgaacggcgagcaatacatccttccgcgtcttatcgataccattattggttgtttaattgctttcggcggtactgtctggctgtggccgcagtggcagagcgggttattgcgtaaaaacgcccatgatgctttagaagcctatcaggaagcgattcgcttgattcttagcgaggatccgcaacctacgccactggcctggcagcgaatgcgggtaaatcaggcacataacactctgtataacagtttgaatcaggcgatgcaggaaccggcgtttaacagccattatctggcagatatgaaactgtgggtaacgcacagccagtttattgttgagcatattaatgccatgaccacgctggcgcgggaacaccgggcattgccacctgaactggcacaagagtatttacagtcttgtgaaatcgccattcagcgttgtcagcagcgactggagtatgacgaaccgggtagttctggcgatgccaatatcatggatgcgccggagatgcagccgcacgaaggcgcggcaggtacgctggagcagcatttacagcgggttattggtcatctgaacaccatgcacaccattagcagcatggcatggcgtcagcgaccgcatcacgggatttggctgagtcgcaagttgcgggatagcaaggcgtaatgcaggctaaaccatcggataaggcattcacgccgcatccgacatcttttgcctgatgcttcgtatttacgccccaaccaccttcgccaccgcgtgggcgaaacgttgcatcccttcatcgatatccgcatcttccaccaccaggctcggtgcaaaacgcatcacatccggtccggcattcagcaccattacgccagcctctgcgcccgcatacaggaaatcacgcgcccgacctttgtactgtggtttcagctctgcgccaatcaacagccccataccgcgaatatcgctaaatacatcgtactgctgatcgatcttctgcagatggtcaacaaaacgctggcgtttcgcctgaatgccttccagcacttcaggggtattgatgatatcaaacgccgcccccgctactgcacaggccagaggattaccgccgtaggtggaaccgtgagaaccaggatgaaacgcagaagcaatttccgccgtggtcagcatggcgctaatcgggaagccgccgcctaacgctttcgcagaggtcagaatatccggcgtaacgccgtagtgcatgtaagcaaacaaatcgccggtccgccccatcccgcactgcacttcatcaaacaccaataatgcctgatgttgatcgcacagctcgcgcaagccctgcaaaaactctggcgtcgctgccgtcacaccgccctcgccctggatcggctcaaccaccaccgcacaggtgtgatcatccatcaccgctttcactgcatggagatcgttaaagggaacgtggatgatgtctgccggtttcggcccaaagccgtcggaatattttggctgcccacccacgctaacggtaaacaggctgcgaccatgaaaagcgttatggaaggcaataattttggttttgaacgggctatgacgcacacaggcgtaatggcgtgccagtttaaaggcggtttcgttagcttccgtgccggagttcataaacaccacgcgttcggcaaacgttgcctcaatcagtttacgcccaagacgcagcgccggttcattggtgaaaacgttactgatatgccacagagtttcgccctgggtttttaacgcgttcaccagcgcaggatggcaatggcccaacgccgtaactgcaatgccacccgcgaaatcgacatactccttgccttgctgatcccagattcggctgccctgaccttttaccggaataaactctgccggagcataaatcggcaggatcacttcatcgaaagtcgcgcgtgtaattgctgtttgttcaattgccatctcatgatcaccctgttacgcataaacaaatgtgaaattataaccacaaaatatgcataaaaaatcactaaatggcaatcagaaatcagcgatgcaggaaattagccagcagttgatgtccttgttcgctaagaatactttctggatggaactgcacaccttccagatcccactggcgatggcgaatccccataatctctcgggtttcgctccaggccgtcacgtcaaagcacgctggtaaactgtcaggttccaccaccaggctatggtagcgtgtcacggtaagtggatttgccagcccccgaaatacgccctcaccgttatgtgtaatcgggctggttttgccgtgcatgacctttgcggcgcgcacaactttaccgccaaatgcctgcgccattgcctgatgaccgaggcagacgccaagaatcggcaagcgcccggcatagtggcgaataacgtcaagggagatcccggcttcatctggcgtacaggggccaggactgatgacaattttttgtggtttaagggcgtcgatatccgccagcgtcaacgcatcgttgcgcttaaccagcacatccgcccccagttcacaaaagtactggtagaggttccaggtaaaagaatcgtagttatctataagcaggatcatggcggctccggtacaaaagaaccgcgctattttactcagattccccggcttcgcttaccactttgctaaatatcatctgcagtgcggtgagatcccccattgccccactctgatttgcctgattccaggcctctttttcgataccctgccagctcagttgatatccggcatgaatcgccagttgctcgaagaagatccgctgtgccagaccacttcccacccggaagggatgcagcacgttgatttcacaatagtaatgcgccagccgctcgacgaacttcgctttctccaggccaaccagataaccttcttcctccagatcctgcatcagggcattgccctctttttcgatataagcaaagtggcagaacggcgtatcaccctgataaatatcaacttcacgcagttgccctgcccagtcgaaaatatcctgatacagctggcgatggatagttcgcaaatgcggtaaaccgcgcaccagcggaccaagctcaatggtcgcagcacgcagcgccgtcatttcgtaagcggcctgttccagccgctgctgctggcggatgttcagccggttacgcatgatatcaaggcctggataaagatacggatcgcgcccttcgccgaatttatcgctcatagtgactcctcagctcttcaaggcgcgctaaagcctctgcggcagtaagagtgactaaaggcatctcgacgccttcaagacggcgactggcctgaaaattacgattacgctgaagctcccagagacgggacttttgcttatcggtgagtttcttcacttgatgcctccctgaacgtgtccatttgccacaagtataagcggcaaatccgggttacgccgggagagcagaagcgcgggcaagattgcccgcgcgagaaatcattacggcaggactttagcggaaaggataactaccggtttactcggcacattctggtacggaccaacgtcatgagtcggcacctgggaaatcttatcggcaacgtccatgcctttcaccactttaccaaataccgcgtaaccgaaatcacgctgaccatggtcaaggaaggcgttatcggcaacgttgataaagaactggctggtggcgctgtctttgtcagcggtacgtgccatcgcgatggtgccacgcgtgttgcgcaggccgttatcggcttcatttttgattggcgggtttggttttttctgctgcatctgctcggtgaaaccgccgccctgaatcataaagccaggaatgacgcggtgaaaggtagtgttgttataaaaaccgctgttcacataatcgacaaagttttgcacagacactggcgctttttgtttatccagctccagttcgatgttaccagcactggttgtcaacaatacgtgcgggtcccctttcgctgccattgctgcgggagaaagagcagaaagagcgaaaacagcagccatcgccgccagggtgcttttgaacatgagatttccttaacaaacagagcagaaaaaaagcaagtgaagagattctaaatagccttcaagaacaaggccatccctttacctaattttacgtatctgaaatatatgtaacctgacgatcactttttattccgtgatcaaaatcacctcttaaaatgcaatttagcaaccgattgcaataaaacatttaaacagatcacaaaatcacctaaaatcgcccgctcgcggcatatcccgctatgccattttatttttgaacgcaggccaatcatgactaacagcaatcgcatcaagctcacatggattagctttctctcctacgcactgactggtgcgttggttattgtcaccgggatggtgatgggaaatatcgccgattatttcaatctgcctgtttccagtatgagtaataccttcaccttcctcaacgccggcattttaatctctatcttcctcaacgcctggctgatggaaatcgtcccgttgaaaacgcagttacgttttggctttctcctgatggtgctggcggttgccggtttgatgttcagccacagcctggcgctgttcagcgcggcgatgttcattctcggggtggtcagcggcatcaccatgagcattggtacattcctggtaacacaaatgtatgaagggcgtcagcgcggttcccgcctgttatttaccgactccttcttcagtatggctgggatgattttcccaatgatcgccgcgtttctactggcgcgcagcattgagtggtactgggtttatgcctgcatcgggctggtgtatgtcgctatttttattctgaccttcggctgtgagttcccggcgctgggcaaacatgcgccaaaaacggatgctccggtagagaaagaaaagtgggggatcggcgtactgtttctctctgttgcggcgttgtgctacatcctcggtcagttaggttttatctcctgggtgcctgagtatgccaaaggcctgggcatgagcctgaacgacgcgggcacgctggtgagtaacttctggatgagttacatggtcggcatgtgggcgttcagctttattcttcgcttctttgatttgcaacgcattctgaccgtactggctggtctggctgcgattctgatgtacgtctttaacaccggaacaccagcacatatggcgtggagtattctcgctctgggcttcttctccagcgcgatctataccaccatcatcaccctgggtagtcagcagaccaaagtaccgagcccaaaactggttaactttgtcctgacctgcggaaccatcggtactatgttgacctttgtggttaccggcccgatcgttgaacatagcggtccgcaggcggcactgcttacagcaaacggtctgtacgctgtcgtctttgtgatgtgcttcctgttaggtttcgtcagccgtcaccgtcagcataacaccctgacctctcattaattgctcatgccggacggcactatcgtcgtccggccttttcctctcttcccccgctacgtgcatctatttctataaacccgctcattttgtctattttttgcacaaacatgaaatatcagacaattccgtgacttaagaaaatttatacaaatcagcaatatacccattaaggagtatataaaggtgaatttgatttacatcaataagcggggttgctgaatcgttaaggtaggcggtaatagaaaagaaatcgaggcaaaaatgagcaaagtcagactcgcaattatcggtaacggtatggtcggccatcgctttatcgaagatcttcttgataaatctgatgcggccaactttgatattaccgttttctgtgaagaaccgcgcatcgcttatgaccgcgtacacctcagctcttacttctctcaccacaccgccgaagagctgagcctggtgcgcgaaggcttctacgagaaacacggcatcaaagttctggtcggcgaacgcgctatcaccatcaaccgtcaggagaaggtgattcactccagcgccggacgtaccgttttttatgacaagctgatcatggcaaccggttcctacccgtggatcccgccaatcaaaggttctgatactcaggactgctttgtctatcgcactattgaagacctcaacgccattgaatcctgcgcccgtcgcagcaaacgcggtgccgttgttggtggcggcctgttaggtctggaagccgcaggcgcgctgaaaaacttaggtattgaaacccacgttatcgaatttgcccctatgctgatggcagaacagcttgatcagatgggcggcgagcagctgcgtcgcaaaatcgaaagtatgggcgtgcgcgttcacaccagcaaaaacacccttgagattgtgcaggaaggtgttgaagcgcgtaaaaccatgcgttttgccgacggcagcgaactggaagtcgactttatcgtcttctctaccggtatccgtccgcgcgataagctggcaacccagtgtggtctggacgttgctccgcgtgggggtattgtcattaatgattcctgccagacttccgatccggatatctacgccatcggtgaatgcgcaagctggaacaaccgtgtatttggtctggtagcacctggctacaaaatggcgcaggtcgccgttgaccatattctcggtagcgaaaacgcctttgaaggtgctgaccttagcgccaagctgaaactgctgggcgtagacgtaggcggtattggtgatgcgcacggtcgcacgcctggcgcacgtagctacgtttacctcgacgaaagtaaagagatctacaaacgcctgattgtcagcgaagacaacaaaaccctgctcggtgcggtactggtgggcgataccagcgactacggtaacctgctgcaactggtgctgaacgctatcgaactgccggaaaacccggattccctgatcctgccagcacacagcggtagcggcaagccgtctatcggtgttgataaactgccggacagcgcgcaaatctgctcctgcttcgacgtcaccaaaggtgatctgattgctgccatcaacaaaggctgccacacagttgcggcgctgaaagctgaaaccaaagcgggtactggctgcggtggctgtatcccgctggtcactcaggtactgaacgcggaactggcgaaacagggcatcgaagttaacaacaacctgtgcgaacactttgcttatagccgtcaggaactgttccatttgatccgcgttgaaggcattaaaaccttcgaagaactgctggcgaaacacggcaaaggctacggttgtgaagtttgtaaaccaaccgtcggtagcctgctggcctcctgctggaacgaatacattctgaagccggaacatactccgctgcaggattctaacgacaacttcctcgctaacatccagaaagacggcacctacagcgtgatcccgcgttctccgggcggtgaaatcaccccggaagggctgatggcggtaggtcgtatcgcgcgtgaatttaatctctacaccaagatcactggctcccagcgtctggcgatgtttggcgcacagaaagacgatctgccggagatctggcgtcagctgattgaagccggcttcgaaaccggtcatgcctatgcgaaagcactgcgtatggcgaaaacctgcgtgggtagcacctggtgccgctacggcgttggcgacagcgtcggcctcggcgtggaactggaaaaccgctacaaaggcatccgtacgccgcacaaaatgaagttcggtgtctccggctgtacccgtgaatgtagtgaagctcagggtaaagacgtgggtattatcgccactgaaaaaggctggaacctgtatgtttgcggtaacggcggcatgaaaccgcgtcatgcggatctgctggcggcggatatcgatcgcgaaacgctgatcaaatatctcgaccgcttcatgatgttctacatccgtactgccgacaaactgacgcgtaccgcaccgtggttagaaaacctcgaaggcggcatcgattacctgaaagcagtgatcattgacgacaaactggggctgaacgcacatctggaagaagagatggcgcgcctgcgtgaagcggtactgtgtgagtggactgaaacggtcaatacgccgtctgcgcagactcgcttcaaacacttcatcaacagcgacaagcgtgacccgaacgtgcagatggtgccagagcgcgaacagcaccgtccggcaacgccgtatgaacgtatcccagtaactctggtggaggacaacgcatgagccagtggaaagacatctgcaaaatcgatgacatcctgcctgaaaccggcgtctgcgcgctgttaggtgacgagcaggtcgcgattttccgcccgtatcacagcgatcaggtgtttgcgatcagcaacatcgacccgttcttcgagtccagcgtgctgagtcgcggactgattgcggaacaccagggcgagctgtgggtcgccagcccgctgaaaaaacagcgttttcgcttaagcgacggcttgtgcatggaagacgaacagttttccgtcaaacattacgaagcgcgagtgaaagacggcgtggtgcagctgcgcggttaatgttttaacgggaggcgcaatgcctcccctttttgcatggtcctgtaataatcttcggtatattgcaggacattttttaaactttttgttttattttttgtttttattttttaaaggataatcaaatgtttacagacactattaataagtgtgcggctaacgctgcgcgcattgcacgcctgagcgcaaataacccgctcggcttttgggtcagctccgccatggcgggcgcgtatgtgggtcttgggatcatcctgattttcacgctcggtaatttgctcgatccatccgtacgccctttggtgatgggcgcgacctttggtatcgccttaacgctggtgattatcgccggttctgaactgttcaccggacacaccatgttcctcacctttggggtaaaagcgggcagcatcagccacgggcaaatgtgggcaatcctgccgcaaacctggctgggtaacctggtcggttccgtcttcgttgccatgctctatagctggggcggcggtagcctgctgccggtagataccagcatcgttcactccgtcgcgctggctaaaaccactgcaccggcaatggtactcttcttcaaaggtgcattgtgtaactggctggtttgcctggcaatctggatggcgctgcgcactgaaggggcggcgaaatttatcgctatctggtggtgtctgctggcatttatcgcgtccggctacgagcactctatcgctaacatgacgctgttcgcgctctcctggttcggcaaccacagcgaagcctacacgctggcgggtattggtcataacctgctgtgggtgacgctgggtaatactttaagtggtgccgtattcatgggattgggttattggtatgctacgccgaaagcgaatcgtccggttgcggacaaatttaatcaaactgaaacggctgccggttaattactaaggggtttttacgtggatcatttgcctatattttgccaattacgcgatcgcgactgtctgattgtcggcggtggtgatgtcgcggaacgcaaagcaaggttgctgttagacgcaggcgctcgcttaacggtgaatgcattagcgtttattccacagttcaccgcatgggcagatgcaggcatgttaaccctcgtcgaagggccatttgatgaaagccttctcgacacctgctggctggcgattgcagcgacggatgatgacgcgcttaaccagcgcgtcagcgaagccgctgaagctcgtcgcatcttctgtaacgtggtcgatgcgccgaaagccgccagctttattatgccgagcattattgaccgcagtccgctcatggtagcggtctcctctggcggcacctctccggttctggcacgcctgttgcgcgaaaaacttgaaagtctgctgccgttacatctgggccaggtagcgaaatacgccgggcaattacgcgggcgagtgaaacaacagttcgccacgatgggtgagcgtcgccgtttctgggagaaattgttcgttaacgaccgcctggcgcagagcctggcaaacaacgatcagaaagccattactgaaacgaccgaacagttaatcaacgaaccgctcgaccatcgcggtgaagtggtgctggttggtgcaggtccgggcgatgccgggctgctgacactgaaaggactgcaacaaattcagcaggcagatgtggtggtctacgaccgtctggtttctgacgatattatgaatctggtacgccgcgatgcggaccgtgttttcgtcggcaaacgcgcgggataccactgcgtaccccaggaagagattaaccagatcctgctgcgggaagcgcaaaaaggcaaacgcgtggtgcggctgaaaggtggcgatccgtttatttttggccgtggtggcgaagagctggaaacactgtgcaacgcgggtattccgttcagcgtggttccgggtattaccgcagcttctggttgctctgcctatagcggtattccactcacgcatcgcgattatgcccagagcgtacgcttaattaccggacacttaaaaaccggtggcgagctggactgggaaaacctggcggcagaaaaacagacgctggtgttctatatggggttgaatcaggccgcgactattcagcaaaagctgattgaacacggaatgccaggcgaaatgccggtggcaattgtcgaaaacggtacggcagtcacgcagcgcgtgattgacggtacgctcacacagctgggagaactggcgcagcaaatgaacagtccaagcctaattattattggtcgggttgttggcctgcgcgataaactgaactggttctccaaccattaatttaacccgggccagagaattctggccttcttaatgactctttttatatattcagcaaataaaacatagccccttaataaatattatctgctaatgggttatattcaccgttacagcgacttacaaaattaagtcattcgctcactgacgccaattaaatattcctgtatcgttcttaacgagcagtctgcttatattcatataatcaatgaatattaattaatatataatacatagggaatgtaaatgaacaaatttattaaagttgcactggtaggtgcagtactggctacgttaactgcatgtactggtcatattgaaaaccgtgataagaactgctcttacgactacctgctgcacccggcaatttctatttctaaaatcattggcggttgcggtcctactgcacagtaagtctctgacagaaatcggctaacaccggtttaattgcccgacgccctctggattttccgagggcgtatttgtttctatgtccttcttgcccccgcccgtaaaaatattttcactttaaattcaatttgataactacatccattagccacagcgcgatcctgtgcgaaattttgtgatcttcctccacattacataacatcatatgttgttatattcatcatgcattgtcatgttaccttttaaatgactgcaaactctcccctacaacgtattggacaagaaaaaggtatcgctatgggaagccaggaactccaacgcaagctcggattttgggccgttcttgcaatcgccgtcgggacaaccgtcggctccggtatttttgtatctgtgggtgaagtggcaaaagcagcgggcacgccgtggcttacggtgctcgcgtttgtcattggcgggttaattgtgatcccgcaaatgtgcgtctatgcggaactatccaccgcttatccggaaaatggcgcagattatgtttatctgaaaaatgccggaagccgaccgctggctttcctctccggctgggccagcttctgggccaacgatgcgccgagtttgagcattatggcgctggcgattgtcagcaatcttggctttttaacgcctatcgatccgttgctcggtaaatttatcgccgccggattaattatcgcctttatgttgctacacctgcgctccgttgaaggcggcgcagcgtttcagacgctaattaccatcgccaaaattatcccgttcactatcgtcattggccttgggatcttctggtttaaagcggagaattttgccgcccctaccaccactgcgattggcgcaacgggcagctttatggcgctgctggcggggatctctgccaccagttggagctataccggcatggcctctatctgttatatgaccggcgaaattaaaaaccccggaaaaaccatgccacgagcgctgattggttcctgtctgctggttctggtgctctacaccctgctggcgctggtgatttccggcctgatgcccttcgacaaactcgccaattctgaaacgccgatttccgacgccctgacctggatccccgcactcggcagcaccgctgggatctttgttgccatcacggcgatgatcgtcattcttggtagcctttccagctgcgtgatgtaccagccgcggctggaatacgcgatggcgaaagacaacctgttctttaaatgcttcggccatgtgcatccgaaatacaacacgccggatgtctccatcatcctgcaaggggcgctggggatcttcttcatcttcgtttccgatctcaccagcctgctgggttatttcaccctggtgatgtgtttcaaaaataccctcaccttcggctccatcatctggtgtcgtaaacgcgacgattacaaaccgctgtggcgtactccggctttcgggctgatgaccaccctcgccattgcgagtagcctcattctggtcgccagtacctttgtctgggcaccgattcccggccttatctgcgccgtcatcgttattgctactggtctgcctgcttacgccttctgggcgaagcgtagccgccagctcaacgctttgagctaatgttatctggagaaaataaaatgttggatattgataaaagcaccgtggactttctggtcaccgaaaatatggttcaggaagtggaaaaagttctcagccatgacgttccgctggtgcacgccatcgtggaagagatggtgaagcgcgacattgatcgtatttatttcgttgcctgcggaagcccactcaacgcggcgcaaacggcgaaacatctggcggatcgcttttccgatcttcaggtctacgccatttccggctgggagttctgcgataacaccccgtatcgcctcgacgatcgttgcgcagtaattggcgtttctgactacggtaaaaccgaagaggtaatcaaagcgctggagctgggccgggcctgcggcgcactcactgcggcgttcaccaaacgcgcggatagcccgattaccagcgcggcggaatttagcattgattatcaggccgactgtatctgggaaattcacctgctgctctgctacagcgtggtgctggagatgatcacccgcctcgcgccgaacgcggaaatcggcaagatcaaaaacgatctcaagcagttgccgaatgcgctcggtcatctggtacgcacctgggaagaaaaaggccgccagcttggtgaactggccagccagtggccgatgatttataccgttgctgcgggtccgctgcgtccgctgggttacaaagaaggcattgtaacgctgatggaatttacctggacgcacggctgcgtgattgagagcggagagttccgccatggcccgctggagattgtcgaaccgggcgttccgttcctgttcctgctcggcaatgatgaaagtcgccacaccaccgaacgcgccattaactttgttaaacagcgtactgacaacgtgatcgtcatcgattacgccgaaattagccaagggctgcacccgtggctggcaccgttcctgatgttcgtgccaatggagtggctctgctactacctgtctatttacaaagatcacaacccggatgaacgccgctattacggtggtctggtggaatattaatccctctcccggcccggcaacgggccggatttacgcaaggagttacccgatgaaaacaggtatgtttacctgcggccaccagcggctgcctattgaacacgcatttcgtgatgcaagcgagctgggttacgacggcatcgaaatttggggcggtcgcccgcacgcgttcgcgccggacttaaaagcgggcggcatcaaacaaatcaaggcgctggcgcagacgtatcagatgccgattatcggctatacgccagaaaccaacggctatccgtataacatgatgctgggcgatgaacatatgcgtcgcgaaagcctcgacatgatcaagctggcgatggatatggcaaaagagatgaacgcgggttatacgctgatttccgcggcccacgcgggctatctcacgccacctaatgttatctggggacggctggcagagaacctaagcgaactgtgtgagtacgcggaaaacatcggcatggatctaatcctcgaaccgttaacgccgtatgaaagcaacgtcgtgtgtaatgctaatgatgtgcttcatgcgctggcgctggtgcctagcccgcgcctgttcagcatggtcgacatttgcgcgccgtatgtccaggcggaaccggtgatgagttatttcgacaaactgggcgataaattacgtcatctgcatattgtcgacagcgacggggccagcgacacgcattacattcctggagaaggcaaaatgccgctgcgggaactgatgcgcgatattattgagcggggctatgagggttactgtacggtggagctggtgacgatgtatatgaacgagcccagactctatgcccgccaggcgctggaacgctttcgcgcgctgctgccggaggatgagagatgaaaaccctggcgacaatcggcgataactgcgtcgatatctacccgcaactgaataaagcgttttctggcggtaatgcggtcaatgtggcggtgtactgcactcgctacggcatacagccgggatgcattacctgggtgggtgacgatgactacggcacaaagctgaagcaggatctcgcccgcatgggcgtcgatatcagccatgtccatacgaaacacggcgttaccgcacaaactcaggtggaactgcacgacaatgatcgcgtttttggcgactacaccgaaggcgtgatggccgactttgccctgagtgaagaggattacgcctggctggcgcagtatgacattgtgcacgcggcaatctggggacatgcggaagacgcattcccacagctgcacgctgcgggcaaacttaccgctttcgacttctccgacaagtgggacagcccgctctggcagacactggtgccgcatctcgattttgcctttgcctccgcaccgcaagaagacgaaacgctgcgtctgaagatgaaagcgattgttgcccgtggcgcaggaacagtgattgtcacgctgggtgaaaacggcagcattgcctgggatggcgcgcagttctggcgtcaggctcctgaaccggtgacggttatcgacaccatgggtgccggagatagcttcattgccggattcctttgcggctggtctgcggggatgacattaccgcaggcgatagcgcagggaacggcgtgcgcggcgaaaaccattcagtaccacggtgcctggtaagtataacgttggcgtgagcatcttcacgccaacgtgctgttacttgccggaaaacgaccctataatccgagtaattcattctttatttcagggtcgattatgagtgctacggaccgctactctcatcaactcctctacgctaccgtccgccagcgactgctggatgatatcgcgcagggggtttaccaggccgggcaacagatccctaccgaaaacgagctttgtacacaatataacgtcagccgcattaccattcgcaaagccatcagcgacttagtggcagacggcgtactgatccgctggcagggaaaaggcacctttgtacaaagccagaaagttgaaaacgccctgcttactgtcagtggttttaccgattttggcgtcagtcaaggcaaggcgacgaaagagaaagtgatcgaacaggaacgggtcagcgccgcgccgttttgcgaaaagctgaacatccccggaaacagcgaagtgttccatctctgccgggtgatgtatctcgataaagagccgctgtttattgatagtagttggatcccgctgagccgttatcctgactttgatgagatttacgtcgaaggaagctccacctatcagttatttcaggagcgttttgacacgcgagtggtcagcgacaaaaagaccatcgatatctttgccgccacccgcccgcaggcaaaatggctgaaatgcgaactgggcgaaccgttgtttcgcatcagcaaaatcgcctttgatcagaatgacaaaccggtgcacgtctccgaactcttctgccgcgccaatcgcatcaccttaactattgataataaaagacattaaccgtaggccggataagatgcgccagcatcgcatccggcgatgctggcgcgttgaattttacatcccgtacgttcccctcaccctaaccctctccccaaaggggcgaggggaccgttcagtacggaatttagcttgacggtgctatccagcattaaatactggcaatactctcacgcaaaatccgcagcaccgtctcttcaccgctgcgattcgggttaatgcgaatcgcacaatgttcactttgtggattcgcctggcgaaacgttccggaaaggcgataaaagagcggcgggatttcatatttgctctctgcacccaccgggtaaggcaaggcaccgcgcttttgcgcctcttccagcactctggcggcaatcggctgatgaaactcgacaatcaacaccttgctctgcgcattagcaatcaccgcgcttttcacttccggcaccgcaccaccgttaagcaaagccagcaaccgttcagatacccctgcctgcaccgcgtgcatcactggcgcaaacaccagaccacgcaatacttccagcgcctgtgcgccctggatctggctaccgccggagtaaagcgtggcgcgaatacggttgataacatcagcatcgccgaccactgcaccaacaccctctggcccaaatagcttgaagcaggaaaatgtgctgacattcgcgccgcattcacagccgattcgagccaccttcatcaccgcatagttgtcatcggttaacgctggaacacctgccgcgcgcaacgttgccagcacatctgccagcacgtagctgtcctgcggctgctggcgcgtatgctgcaccagcgccgcatccggttgttgctcgtcgacgacctgcttcagtgcgctcaggtcattgaaatcaacagtaataagcgtcagccccatctgctcaataataacccgtgtcgtcgggtaaacaggcgcgtcatgcaccagaagacgctgccccggtttgagcaaagccgccagcccggcgcgaatcgcgccagtccccgcgtcctgcaccagcgccgcagcctgtgcgtgaaatgcatcagccagcacctgttccacacgctgggtaacgcgcggttgattcagtcctggcgttaagcctaaatcaccgccagtaagaaactcgctgccggggaaatggcgacaaatgctatccaccagcgcaaactgcttttgctgcgcctcaataatcgtcaggctttgcagaggaaacgtcttcataggtgccttccttaagccggaacgaacaggccaagccagtaaagaacattcagcagaataccggtgatcattactgccacgaccggtgccgccattttctgtaccggacggcccagggattcgttgaggaagtaaatggcaaccgcgatagagaatccggtataacccgccatcttaattgctgcgaaaatgctaccgaccagcagcgccacttccatcagcatattcatggcgttacggatgttatcgctcgcattacgcacgctcgggtagcgtcccagccatttgccgatgctacgaagcagcaagacttccgcgctaataaccactgcgcctaataccgctgcaaccatcggattcgggctgagatagtccaccgcataaacaaaggtaaagcccgcaactgcatacacacccgttgctaacgcggtggtggcaatcaacggcacaaaccccagtccgcgcataaattctgccagagccgcctgattaatcagcgtttggctttgttccggcgttacgcctgcggaatatgctttctccagtgtgaagatgctcacttcactgccagcaaaaatcttcatgctggcaacggcggcaatcaatgctcccacgatggcgatatagggtaagtttttgataatccgactcgtgcgttcttcaaacacgctaagcccgctggcatcaatgtcattttcatcacgatgacgcaggtcgtgagttatcgcgatccccagcagcatcaccatgccaataaagatttcgatggattcagggttaagatgtgggaaatagcgcacgactaccacacgggtcatcagtaccaccacggcggcgatcagactttgcttccagccaaactggtagaaaatcgccaccagcgggaacagtgcaaaagcactaaccaccgggctgcttaattcccccaggctacctaatacatccaccggcagcgcggtcagcagctggtttactggcaacaggcaagtaaggatcaacacgccccagatagcgccaagaccaaacgccatcaggctgtttatcgccaggacgccgaggatatcggtaggaagaaagagtaaccatgcgttgagcagcccggttttcagggtaaaagagatccccacgctggccacaaaaccaatgctcagaccaaaagcgatactccccgcctcgcgacggttcatatagccttcaatcagttgcggcaggatcgggcggatgccgtcatgaaaaacagccgcgctgcgatgcgccagaaggcttgtcatacccgtcaggcacgccaccacgataatctgaatatacagatccatagtcgtgccttttatttcagatggttaatcagcatcggaatcgcgtgttcgacgtgctcaacggaaaggccaaacgccacttttccttcagcgatcattttggcgatatgctcgtctttcgctttaatgcctggtttggcaatggtgcaacttttgttatagcctatcaccgcgatggcaatgctcaatgccgcgcccgcaccggtattacacgcgccgatgtaataatccagttgcccggatttcaccttcattgccgcttccatgtcgttgtgaatgaaaacttcaaaacagccaggagccgtcgcttcaatagtttttttaatctgctcacgctgtaagcctgcaacgccaatctttttcatgagtctgtccttattggaaaaattgagagggattttcacgtaacatcacatccacatcggcctgactgaatccactctggcgcaattgcggaataaaggtggttagtaaatagtcatagccataaccaccgttggcttttaaatgggagcggcgcgtaatatccatgctcagcatgacgcggttcagcaacccacggtcgcgtagcgcatgaagcatcgcaatacgcttttcgtccgggtagtaactgttcttgccgatggtgtcgaactgcacgtacgcgccgagatcgatcatcttcaaaatgttgtcgaggttgtctttcagatcgcagtgaccaacggtgacgcggctaagatcaaccccgtgggcttgtagcaacgccagttgctccagccccatcgtgctgaagctcgtatgcgtggagatcgggcgtccggtctggttatgcgccagcgcagcggcaataaataccttctcttccagcggcgtaatctttccttcgctggtgccgatctccgcgatgatcccggctttcagctccgtgccatcgataccctgttcaatttcatcgaccatctcctgcgccagttcctgcacgctgcgggtcgccacatgttccgggaaaaacgcgtcctggtaataaccggtacaggccaccacgttgatccccgtctcgcgcattacatcaagcataaattgcgcattgcgccccatgtaacggttggtcatctcaatcacattacgcacgccccgggtcatcaggtcgttcatctcctggcaaatgaacgcatactgatcaaggcggcagtccacgttgtttttaaagccggagagatcaatatgcagatgctcatgggcgagggtgtaacccgtcggatcaaaactcatagggtgtctcctgcaaaccggagggaggaaagaaaagagcgaccattttgtggcggtggcgcgcggaaaaattcacacacggtagcccccacatcagaaagcgtggtgcgcacaccgagctgcgtagcgatcatcccttgctgataaaccagcactggcaccacttcgcgggtatggtggctgtgaccaatggtcggatcgttgccgtgatccgccatcacgaccaggcaatcatctggctgcatcgcctcaacaagccgggcaaggttacggtcaacgacctgcaaacgttcggcataacgtgcgacgtcttctgcatgaccagcgaggtcggtttcctgaatgttggtgcaaataaacgccgtcggatgggtgttaaattcgttgagggtgatatccataatccgctggctatccaccagattttgccagctcacgccataaggattgttgacgatatctgccaccttacccaccagcacggttggcacgcctgcttcatacagtttttgtggcacctgcactttttcatcgacgccatagcccatatgcacgacctggaaaccgttgtcataagcgccagaacgcggcgcattgataccaataaagcgcccttctttgctttctgcggcatcgagaatgcgttgactgtcggttaacaggccaccaaatgtaatgacccgaccgacctgtacctgctcacgcacgatacgaccaattttgattgcgtcgtcaaaagagatcacagagagattggcggtaatgttatagacctggcctaaatccgcctcgagattatcgccaatcgcaaccgcctgattgacccacagaaattgcagatcatcgccacggcgctccacctgccagccagcggaaactaatgcctgctcaacacggtcaatcacatcgcgaaaaggcatccgcagcggcggtaacgggcgcgtgcctaaaatttcctgatgccccataaaggtatcgccaccttcatgttgcagctctgccacgccccaggttgcggaatcactcggctgcatatcgcctggcgcataacccaatgcgttgattagccccagcgtctccagcgttggtagctgcaaatgcggcaactggctcaggatgtgaccacatgtattcgctcccgcatcttgcggacgcaccagcgtgacatctttcattgcccctacgccaaagctatcaatcactaacaccacaaatcgcgccattacgcccccagagagtttccaagactgtcataacgaccgacgatttccggttcgccacgatgaataccggacaccagcaccacatcgctacgggtgacaaaaatctgcgtgcgaaaacagagcaccactgcactgcttaccggaaactcgcctgccagcggcagggtgtagtcgatactgctgtcatccacagttttgagattggtttcagtaatcttttgattttctggcgtaaacaccaacgcatgttgcgcatgaccacgacgatagtaaccgccgccgtagcagtagctgtcgccacggaaatgatgggagatttcacttaaccagagcatcgcgatacgttcaggctgatcgccctgctggtttgccggaatagtgcccgtcagcgcatgaccgggttcggcatgagtcacaccgtattgcgccagtaatggcaggctagtgcagctggtcgcactaggcgcgttcagttgctcaagtgcaataccagatttcgccagttgatcccgtgcctgtatcagcgtgtgaagattcggtgtcggcaaaacttttccgacagcctcatcccaaagcaggcaagggaaatgggtaagtccggctaaatgcagccctggcagattctggatttcggcgacaatctccggcaacaccttgagggcaaaaccgctctcctggcccggataaagaaaatcatcgtcgctataaactttaagcagcacagactggattcgcccggccttcaccgccgccgcagaaacttcccgcgctttgtcgagagtaaacacggtgatgacgtcggtgccctgttcaacggcgtcagcaacctgatgacaagggatttgtaccagatgcccctgatgcgccacaggcaaaccagcgcggcgcatgactcgcgcctctttgtaatccaccgccacaatgccgctgtagcctaatgccagcaatttttccgccagccacggattacgaccaaactgcttggtcatcagatacagttcaatgccgtaaagccgcgccgtctcaatcagccgcttaccgttttccagtatctgatccacgtcgatcacccagctgtccggggcgatcttgccctgctgccacaggcttagtgcggcggaaatcagcgccgggttctggcgtttcaatgcttctacaaacatcttgttgcctcgtttctgttccttgaattaaatattcatttttttgaatatttaggttgtgcgacgtggatttgtcgggagcttcaaacctcttcgttagcagccatccataatccataaaggttggccagcaaatagccttcttcacacgggttaacttccagtgcgaattccttcaacaacacctgatgcaattgcacaacggcttgccagtggctggattgcgccagttctgccagcaactcgttatccagcggctctatttcttcaccacggcgactgcgcatcagtgcactcgccatatgtgtcatcgccatcgttccttgctcactgcgcaccggcagatggcactctgtttccagtacgttgacgacctgcatcatgcctttgcagatgtccttatcaataacgcctgcctcgcaaagcaggttgagtctggtttccatatcagatgcctttcgtttaataactcggttcctgttccccactcactacccgttgttgatgggcgagcagggcgtgtttatctacaacggcacgcagcagttgttgcattgggtaatcatcgactcgcgtcaggaccacggcttcggtggcctgtaaaaatcgcggatcgtctgtgagcggcgtcgcctctaatcccagcatggtcagttcgttttccgccaccacgttccagatcaccgcatcgacatcgcctttaacaatgcgttgtaaactctcgtgataagagagatcgactcgttccacatcactaccgccaaaaaaaacatcggtcatgattttctgatccgcgctacggttatccagccccacgcgcttcacgtttgcggactcgcctttacggcaaatcaactggtgctcgccaacgtaggtgtgcggccccaactccagcgcgaggcataagcctttttgcgtgagataactttccgccgctagtcggctaaccaccgccatgtcatacacgccattaagcagacactccacgcgaatatccgcgccacgcatgtgcgcatagtaaaaaggaatgccatcaaactgggctttcaatccgctcgccaggccttcgtacaaacgggtatagggcaagggcattgcacataccacgttgttgatatccacatgagtcagcaatgctttgttatccatctcgaccagataactgccattgcgcccacggcgttcaatccgtatcgctccgctactttccagcgttttcaacgcggcctgcgtcaggccaacggaactacggcattcatttgccagctcatctatggttttcaatcgattaccgcacttttcacccaacaaataacgggccagcgtcgtgatgacgacgccttcttttttgataaacgttcgacgcataataaattttcagtaaattgaatatttatatcttcaggaatttgaagataaggcgcaacagcgagatgtggaaacggcgaggcacttcacattttttcggattattgcaaatgaggataaaaaaaccgggtttccccggtttcagagtgatgataaaagcaaaattgcctgatgcgctacgcttatcaggcctacatttccttgcaatatgtgcattactttgtaggccggataaggcgttcacgccgcatccggcatgaacaaagcgcaatttgccagcaatagtgaattacggcttcgccacaaaaccaatcgcttcgtacaccgcttttagcgtacgggaagcgtgcgcgctggctttttccgcgccatctttcatcacctgttgcaggaaggcttcatcgttgcggaaacggtgatagcgttcctgcaattcagtcagcataccggaaacggcatcagccacttcacctttcagatgaccatacatcttgccttcgaactgtttttccagttctgggatgctctggcccgttaccgcactaaggatatccaacaggttggaaacgcccgctttgttctgcacatcgtagcgaactaccggcggctcgtcggagtcagtgaccgcacgtttgattttcttcactacgcttttcgggtcttccagcaggccgataacgttattgcgattatcgtcagacttggacatcttcttggtcggctccagcaggctcattacgcgcgcgccagatttcggaataaacggctccggcaccttaaagatctcgccatacagcgcgttgaaacgctgggcaatatcgcggctcagttcgaggtgctgtttctggtcttcacccaccggtaccagattagtttgatacagcaggatgtccgctgccatcagcaccggatagtcaaacagaccagcgttgatgttctcggcataacgcgcagatttatctttaaactgcgtcatgcgactcagttcgccgaagtaggtatagcagttcagtgcccagcctaactgtgcatgttccggcacgtgggactgaacaaaaatggtgcttttctcaggatcgataccacaagccagatacaaggccagcgtatccagcgtcgctttacgcagcttctgtgcatcctggcgcacggtgatcgcgtgttggtcaacgatacagtaaatgcaatggtagtcatcctgcatgtttacccactgacgcagcgcacccatgtagttaccaatggtcaattcaccactgggctgtgcgccactaaaaacgatgggcttagtcatttttgctttcctgattttcgctatgcggaagccctaatgcgggcagaaggtcatttatagactgataaattacatcaggctggctgagatcgatagcctcgccgtagttatatccgtaggttaagccaacacttgggcaacctgccgcttttgccgcctgaatatcattgcgactgtcgccgacaaacagcatctgttgtggggcaattcccatccgctcagccaccagtaacagcgggtccggatgcggttttttgttttgcacatcatcaccaccaatcaccacgctgaagtatttggcgatatctaaggcttcgagcagcggcgcgacgaacggcgtcggtttgttggtgaccaggcctagcggcaggcctttagcctgcaacgcgcccaacgtatcggcaacgtgcgggaacaaaaacgtcccctcttcggcaacctcgccatagtagcgatcgaacagtttacgcagaatacgtacctgttcttctgccggaatgtcgtcatcaacgggcggtttacccattgttttacgctgagtcgcacgttcctgacgcgcccaggtcaatgcgcgctccatcagaacatctgcgccgttaccaatccaggtaataacgcgttcttcacctgcgacgggcaactccagcgcatacagcgccatatctaccgcagcagcaagaccaggagcactgtcgaccagcgtaccatcaagatcaaaagcgacgccgcgaatatcttcaaacttattcatgacttacctttgccagttcactgcgcatttcatcaatgacttttttgtagtctggctggtcgaagattgcgctaccggcgacgaacatatccgcgcccgccgcagcgatttcgccaatgttgttcaccttcacgccaccgtccacttctagtcgaatgtcaaagccagactcgtcgatacggcgacgtacttcgcgcagtttatccagtgtttgaggaatgaaagactgaccgccgaaaccagggttgacggacatcagcaggatcacatccagcttatccatcacgtaatccagatagctcagaggtgtcgccgggttaaataccagacccgctttacagccattttctttaatcagttgcagcgtgcggtcaacatgctcggaggcttctggatgaaaggtaatgatgctggcaccagcggcagcgaaatcaggcacaatgcgatcgacgggtttcaccatcaggtgtacgtcgataggggcggtaatgccatagttacgcaaggatttcagcaccattggcccaatcgtcagattgggaacatagtggttatccatgacgtcaaaatgcacgacatcagcgccagctgccagggcttttgcggtatcttcacccaggcgggcaaaatcagcgctcagaatactgggggcaatcaaatactgtttcatccgcttctccttgagaattattttttcgcgggactaacgactcctggtttgtacaaagccagcagttcgtccacctttttacgtgtgccgccgttgctgcttatactgcgtcgaactttgacgacatgcaattttgcgcgctgataccactcacgcgttaacatcgtatcgtgattggagatcagcactggaatatggcgctcaaccagaccttcggcgatctccgccagatgcgcttgttgttcaagcgtaaaactgtttgtgtgatacgccgtaaagttggcggtcgcagacagcggtgcataaggcggatcgcaatagacgacggatgcatcatctgcgcgcgccatgctatcggcgtaagactcacaatagaaaaaggcattctgcgctttttcagcgaagtgatacaactctgcttccgggaaatagggttttttgtagcggccgaacggcacgttaaactcaccgcgcagattgtaacgacacaggccgttgtaaccgtagcggttcaaatataaaaacagtaccgcccgacggaacggatcctggcttttgttgaactcttcgcggaactgatagtaaacctcggcgcaatttgtttcgggaacaaacagctcgcgtgcggcctgtacgtactcatcagtacgcatcttcacaatgttatagagactgatcaggtcgctattgatatcggcaaggatataacgagaaaagtcggtgttgagaaacacgctcccggcacctacaaaaggctcaaccagacattcgcccttgggcaaatgccgtttaatatcatcaagcaggggatacttgccccctgcccacttcaaaaaagcgcgatttttcttcatgctgactaactaattacaccttctccggctgtggagaaagctccgacagcatccagcgcttcaggcaactcccgcaacgataaaccattgcgggagataaccttgattacttcagatcggcctgtacctgacgcagcggtttcgcccacgggtttttggcctggacatctgctggcaatgtagataccgcttttttcgcctcttctttgctagcgtacacgccagaaaccaggacataccacggctgaccattacgcgtcgtttcatagacaacgtagtttttcagattctctttcttcgcccaaccgttcaggttgtcgtagttagaggaactgctcagctgcagagtgtaatggctggacggtgcgcttttcaagctaccaacattacctgcggtcttcgccccagcagcgggtgttgctgtggtttgcgccggggatgccgtctgtactggagccgtagtcgccgtctcttttggtgctggcgtagaagtcgcagccggtgccttcgtgctcgccacaggggcagctggttcagtacgcttcggcgtctgtgctaccggcttcggctccgttttcacggttgcttgcggttttttcggttcaatcaccgcctgctgacgagctgggcgcgtagtggacggacgttcagcggtttgcgttttcgccgtgtcacggcttgcattgccattgcgaacaggcgcaaccgttgcgggttcagtcggcaacgtggaattgaccgccacattgttcagctgttgctgattttgtggctgggtcagcgcattgttcaggtcaccctgcacttcaacacgttgttgaccatccgttgccaccggggtttgcccttgagtcggcgtagaagagatcggtggcagagaaacatcctgctgagtattttccgcagacgtggttcccggcgctggctgcacgccattcgcctgatcggtcgcattgccagcaagatcaatactcttctcgccagacgcggtttgatcgctggaagtggtgctgggggcttttagcgcagaaccgataccgatgatcaacagcagtagaaccagaatgccgacgcccatcatcatatactgacgagaagcgggtttactggctgcttttttgcgcttacgcggacgacgctctacgcgctcttcatccacggtttcatcttcggattcgtcaatttcttcttcgatttccggttcctcattgcgctctttttgcgcacgagtcggacggcgatcgtcagtgtcatcaagttcaatatcatcaaaattgatctgcggttcgccacgttcagtacgctcagaacgttcagaagattgacgagaacgaccagtacgacgatcgctgggatcgggtttcagctcgtcttctggtttgaattcatccatttaacaccccactaaaaggttaatgcttaccacgttgcaattaacctgaagctaatagaccgcttgataagcggcctgacctttcttgttgttacgcactttgacaatcggcaatggcgttaagaacaagctcgtggctaacgccgctgcgaacttcactcttaccaattgccaacggaagaattaagcgcatctctcccgcaaggactttcttgtcacgcagcatatgcggtaaatacgcctgcgcggacatttcgcgcggcccattgaccggtaacccagcccgcttgagcagggttataatacgctgcgtttcggcagaactaaactgcccgagacgttcgctcgtccgcgccgccatcaccatacccgcagcgaccgcttcaccatgtaaccaattgccataccccatttcagcttcaatggcatgaccaaaggtgtgtcccagattcagtaaagcacgtaacccggtttcgcgctcgtcggcggcgacaacttctgccttcagttcacaacaacggcgaatacagtacgccattgccggaccgtccagacgcaacaacgcatccagattctcttccagccagttaaaaaacgcaccgtcaagaataatgccgtatttgatgacttctgccagcccgctcgctaactcacgcgggggaagcgttttcagacagtcgagatccaccaccacactagcaggttggtagaacgcgccaatcatgtttttaccgaggggatggttgaccgcagttttgccgccaacggaggaatcgacctggctcagtaacgtcgtcgggacttgaatgaaacggacaccgcgctgataactcgccgccgcgaagccggtcagatcgcccactacgccgccgccaagcgccaccagcgtagtatcgcgaccatgcggtttttgtaacaacgccgtaaagacggtatcgagtacagccaggcttttatactgctcgccgtcagggaggataacgctatcgacgttaacacccgcctgttcaagtacgccgcggaccttatcgagatacagaggagccagggtttcgttggtgaccaacatgacctgctcgccgcttttcagcggtaagaaactagctggttcattaaacaaaccagatgcgatggtaattgggtaactacgttccccgagagtaacgacaatcctctccataacgcgacatccaccttaattactgtacccgcagacgagtgtatataaagccagaattagttgctttccagcatgtgaataatctggtttgcaaccactttagcgctttgatcatcagtacgaatggtcacgtcggcaatctcttcatacagcggattgcgttcattggccaacgcttccagaacttcacgcggcggtgtttcaacgtgcagcaacgggcgttttttatcacgctgcgtgcgtgcaagttgcttttcgatggtcgtttcaagataaacgacaacgccacgagcggaaagacggttacgcgtttcacgggatttcacagagccgccgccagtagccagcacaataccctgtttctcggtcaactcattgatgaccttttcttcgcgatcgcggaagccttcttcgccttctaaatcgaaaacccagcccacatcagctccggttcgtttctcaatctcttgatcggaatcgtaaaattccatattgagttgttgagctaactggcgcccaatagtgctttttccggcacccataggcccaaccagaaagatattgcgtttctctgccattttttcggtactactaagactattcgttaatgataaacccgcttcgctcagagagcgccgcaggacatgaactgaaacctcataagatattgcgagagtcagactgaaaattatctcaatactccagcgggtttggcaactgaataaatcacccatccctctgcatatctggtcgctgcaagcgcgctgccttgctaccaccgctctggcgataaatcaccgggtaagattagcgtaaaaaagacagcaaaatgccgcctgaatgataaatcatcatcatggaacgcaggcagcgaagagcaccaactctcaaatcggtactccttgtatgctaaatacctgcgcgcgtcaaatagatgaaacacgttcagcgtaaaaacattaccgcttttacggctgtttactcactggaaaccagtcgtggcgtgataaacaccactaactcgcgtcgttcatcttcttttccgtcatgacgaaatgattgcccgaaccagggaatgtcgccaagcaacggtacgctatcctgaccgcttttatttttacgggtaaaaatgccgcccagcgccaacgtttctccgcttttgacctcgacctgcgtttcgatctcctgcttatcaatcgccagcacttcgccatcggcctgctgtagcacctgccccggaacgttctggctgatgtgtaatttcagccggatgcgacctttttgtaacaccgtgggcgtgacctccatccccaggacggcctctttaaattccacgctcgtcgcgccactttccccgctggaaacctgatatggaatttcgctcccctgtttaatgctggcaggctgaagatgactggccagcagacgcggactggcgataatatccagctgctgtttttgttcgagcgcggaaagctcaagatccagcaagcgtccgttgatgcgcccaatgttaaaaccgacatgcgttgtcgccgtcgctacggagaggtcgctaccaagcgtggtgacttgcccaacgccaccagcgtgttgcgcatcggccagcgtccatttcacgcctaactcacgcaaacttttttcattaatggtgacaatatgcgcgctcagctcaacctgcccgaccggcagatccatttgcgctacccactgttcaagcgcgcttaacgccgttttgttatctcgtagcaaaaggcgattggtgcgtttatcgacggtcatactccctttggcactcagcagcttctcccccgctttcgccagttctcccgcgtcggcgtattgcagggttatactgcgattttccagcggcagatttgcctgcgcccgcgcctgctccgcctcctggcgggcgatattgttattctgccaggcaatggaatgcacactgagaatgttgccttcctgccgcgttatcagtccggcgcttttcactacagtttgtagtgcctgcttccagggaacatctgttagatgtaagctcaccgtaccgctgacgtctgggctcacgaccaggttcaacttctcctgttcagccagcgcctgcaacacctgagctaccggaacgtcatccaccatcagcgtcactttttgcggctttgccgcctgtacgccgggtatcagcatcaacagtagtgcggctatccattgcttcatttgtatctccttgccgttgccacaaccattgtggcggttcgcagtttgtcccggtacccagcgttagtacgtctggcgtcagctgtaaaattgtccagccgttttccagcacatcgttttgctgcacccgtcgccatttcttttgcccgtcttttattacaccgatgatgcgctcgcctcgccctaccatcccctgatagcgccactggctaagttcgctaatccggcatagatcttccggcggtttaaaagggtcacgcataccggttaaaaggcacaatgcaatacctgccaacaaccagcgtttaaccctcatgcggcgtctccagttgtagcgtgaacaaaagatcatcaccttccacgcttaagctaaaacggctcacgctgacgttgcgctctgccagccgtgtaaatgcgctcggcactgcttcccacagcgttttcaacgccaactcgcctccctgcgcggatggatgccaggaaaccagttgcgcgccggataactgaaaatccagtgggctaaagggcagcgttttttcctcgctgaagggagcggtgtctaccaggcgatacagtgcggcccactgctggtgatgacttgcccgtagtcgaattaatgcgtcgcgctcttcatggtgtgtgctactcagaaaaatgagcgtaactaacatcagcaaccagaatgcccagcaaagctggcggaggcggggacttgtggcgaaccaccagtcaaagaacatgttcatcgctaaccttccttgttaactgatactcaaattgccagcgtccctgcgcatcctgctgcgtggctccccgctgattgagatgaaaagatgcatcctggcggagactcgtttctagtgcgtttaacgcggtaatgcttgttgtcagccccttgatctccagcgttccctgctgccagcttatcgttgtcagccaggcgtgctcgggtaaaagcgccgccagtgcttccagcgcagattgccagtcgcgggtaaattgtcgctggcgctgccgttggctacgctgttcgcgtaactgctgttgctccagcaaacgtggcttcgttatctgtaagctgcgggcgagttgttgttccgcctgaagcaaaactgcgtctatgcgcgcttcggcgctgcctgtcagacgcagtattagcgttatcccgacggccagcagcagaggcgcaacgaacatcagcaaccagaaacgcagaaaagcggtccggcgttgctgtcgccagggcaaaaaattaattggcgggttcatcagtacgccttcccaagcgccagccccagcgcgatggcaaagtctccacctggcggcggtagcggcggctgacgaacagaaacggcctcccagggatcaaatccgccttcgccacatatcgcgacgctttcgggatcaacggataacgctgccgccagctccttcgcgctagtcatccccaccgccagtttgcgcccccagctatagcgcgtcgcccacagccactgttcgttatcacgccaggccagacattgctgatgagaaggtaaaaaaggcaggaatcgctgtaatgcactggcatccggggtgatcgcgctcacatgaacacgcaacctttctgccagagtaagcagcgttgccagctctttgctttgcgcggcagtcacgttataggcgggactgagactgtcttcgctgtaatcgaagcgcagggagtccggatccatatccagctcgcgggccatcgtcccactcagccaggccgtttgctcccgctcaccaagggacatgctcgggcgcggaaaactccgctgtaatgtgcgactggcgggaaacgccaacataatgtgatgacgctgcggcagttcgcgactccacggtaacaacgttttagccagctgctgcgcatcaacaatccgcccatctttgataatgtcgttctccagcggcaaccgccaccagcgttgcaaaaagcattcttttgcgccccgcacgatcgcaaccgctaccgcttcttgctgttgtaaatgcaaaccaatttgccagatcttaaatgccattgtgatgatctccttatcacccgtcactctgacgggtatatcaatgcgtctggcttgcctttatactaccgcgcgtttgtttataaactgcccaaatgaaactaaatgggaaatttccagtgaagttcgtaaagtattttttgatccttgcagtctgttgcattctgctgggagcaggcagcatttatggcctataccgctacatcgagccacaactgccggatgtggcgacattaaaagatgttcgcctgcaaattccgatgcagatttacagcgccgatggcgagctgattgctcaatacggtgagaaacgtcgtattccggttacgttggatcaaatcccaccggagatggtgaaagcctttatcgcgacagaagacagccgcttctacgagcatcacggcgttgacccggtggggatcttccgtgcagcaagcgtggcgctgttctccggtcacgcgagtcaaggggcaagtaccattacccagcagctggcgagaaacttcttcctcagtccagaacgcacgctgatgcgtaagattaaggaagtcttcctcgcgattcgcattgaacagctgctgacgaaagacgagatcctcgagctttatctgaacaagatttaccttggttaccgcgcctatggtgtcggtgctgcggcacaagtctatttcggaaaaacggtcgaccaactgacgctgaacgaaatggcggtgatagccgggctgccgaaagcgccttccaccttcaacccgctctacagcatggatcgtgccgtcgcgcggcgtaacgtcgtgctgagccggatgctggatgaagggtatatcacccaacaacagttcgatcagacacgcactgaggcgattaacgctaactatcacgcgccggagattgctttctctgcgccgtacctgagcgaaatggtgcgccaggagatgtataaccgttatggcgaaagtgcctatgaagacggttatcgcatttacaccaccatcacccgcaaagtgcagcaggccgcgcagcaggcggtacgtaataacgtgctggactacgacatgcgccacggctatcgcggcccggcaaatgtgctgtggaaagtgggcgagagcgcgtgggataacaacaagattaccgatacgctgaaggcgctgccaacctatggtccgctgctgcctgccgcagtcaccagcgccaatcctcagcaagcgacggcgatgctggcggacgggagcaccgtcgcattgagtatggaaggcgttcgctgggcgcgtccttaccgtagcgatactcagcaaggaccgacgccgcgtaaagtgaccgatgttctgcaaacgggtcagcaaatctgggttcgtcaggttggcgatgcatggtggctggcacaagtgccggaagtgaacagcgcgctggtgagcatcaatccgcaaaacggtgccgttatggcgctggtcggtggctttgatttcaatcagagcaagtttaaccgcgccacccaggcactgcgtcaggtgggttccaacatcaaaccgttcctctacaccgcggcgatggataaaggtctgacgctggcaagtatgttgaacgatgtgccaatttctcgctgggatgcaagtgccggttctgactggcagccgaagaacagtccaccgcagtatgctggtccaattcgcttacgtcaggggctgggtcagagcaaaaacgtggtgatggtacgcgcaatgcgggcgatgggcgtcgactacgctgcagaatatctgcaacgcttcggcttcccggcacaaaacattgtccacaccgaaagcctggcgctgggtagtgcgtccttcaccccaatgcaggtggcgcgcggctacgcggtcatggcgaacggcggcttcctggtggacccgtggtttatcagcaaaattgaaaacgatcagggcggcgtgattttcgaagcgaaaccgaaagtagcctgcccggaatgcgatattccggtgatttacggtgatacgcagaaaagcaacgtgctggaaaataacgatgttgaagatgtcgctatctcccgcgagcagcagaatgtttctgtaccaatgccgcagctggagcaggcaaatcaggcgttagtggcgaagactggcgcgcaggagtacgcaccgcacgtcatcaacactccgctggcattcctgattaagagtgctttgaacaccaatatctttggtgagccaggctggcagggtactggctggcgtgcaggtcgtgatttgcagcgtcgcgatatcggcgggaaaaccgggaccactaacagtagcaaagatgcgtggttcagcggttacggtccgggcgttgtgaccagcgtctggattggctttgatgatcaccgtcgtaatctcggtcatacaacggcttccggagcgattaaagatcagatcagtggttacgaaggcggtgccaagagtgcccagcctgcatgggacgcttatatgaaagccgttcttgaaggtgtgccggagcagccgctgacgccgccaccgggtattgtgacggtgaatatcgatcgcagcaccgggcagttagctaatggtggcaacagccgcgaagagtatttcatcgaaggtacgcagccgacacaacaggcagtgcacgaggtgggaacgaccattatcgataatggcgaggcacaggaattgttctgattaaaaaggcgcttcggcgccttttcagtttgctgacaaagtgcacttgtttatgccggatacggcgtgaacgcgttatccggctaacaaaatcgtgaaaactcaataaattgcagaaaccccataagcctgataaacattgtgcatcaggcaaacttcacgcatttacactcgcccctgccctttcaaccattcgcgcacgaggaacagcgcactgacattgcgcgcttcattgaagtcagggtcttccagccaatccatcatatgcgccagcggccagcgcacctgtggtagcggctctggctcatcgccttccagactttccgggtagagatcttgcgctaccacgatattcattttgctggaaaagtaagacggtgccatgctgagcttcttcaaaaaagtcagatcgttcgctccaaatccaacctcttcttttagctcgcggttagcggcttcgtagacgctttcacccggatcaattaatcctttgctaaaacctaattcgtaggattcagttcccactgcgtattcgcggatcaggatcaggtgatcgtccacaatcggcacaatcatcactgcttcccggttggttggacgcattcgttcataaacacgccgcacgccattgctgaactccagatccacgctctcgacggtaaacagtcgggaacgggctacagtttcaacattcagaatggtgggtttttgtaaacttttgctcatcgtgggatctatgctgtgaaatcagcggttattgtgcgatatcggacacgctttcggcaatgtgaattgcatgttatttacatttatgtaacttaataaataatcgtcctcaaatcaaattaaaagtcaataggttgaaataactccaggaatttgctgatattccgccttcagagggtttgctatgatcagcggttactgtgatgtgcttaatgatgctcaagttaaactccacgcttgccgatagccaaccgcagaatcatgtattgtgtccggtgcgactgaccacgcctgacagactaagtaagatggggaaagcatgagcaccattgtgatttttttagctgctttgctggcctgcagtctacttgcgggatggctgataaaagtgcgatccagacggcgtcagctgccctggaccaacgccttcgcggatgcgcaaacgcgtaaactcacacctgaagaacgtagcgccgttgaaaattatcttgagagcctgacgcaggtattacaggtgcctggcccaacgggagccagcgcggcaccgatctctctggcgctgaatgccgaaagcaacaacgtcatgatgctgacacacgctatcacgcgttacggcatctctaccgacgatccgaataaatggcgttactacctcgatagcgtagaagtccacctgccccctttctgggaacagtacatcaacgatgagaataccgttgaactgattcataccgatagcctgccgctggttattagtctcaacggtcatacgctgcaggagtacatgcaggaaactcgcagctatgccttgcaacctgttccgagtacgcaggcgagcattcgcggggaagagagtgagcaaatcgagctactcaatattcgcaaagaaacgcatgaagaatatgcgctgagtcgtccgcgcgggctgcgtgaagcgttgctgatcgtcgcctccttcctgatgttctttttctgcctgattaccccggatgtatttgttccgtggctggcaggcggcgcgttactgctgctgggcgcaggtctgtgggggctattcgcgcccccggcaaaatcctccctgcgggaaattcattgtctgcgcggtacaccccgtcgttggggattgtttggcgaaaacgatcaggaacagatcaacaatattagtctcggtattatcgacctggtctatcccgcacactggcagccatacattgctcaggatctcggtcaacaaaccgatatcgatatctatctcgaccgccatgtagtgcgtcagggacgatatcttagcctgcatgatgaagtaaaaaactttccgttacagcactggctgcgcagtacgattatcgctgcgggcagcctgctggtgctgtttatgctgttattctggatcccgctggatatgccgctgaaattcactctcagttggatgaaaggcgcgcagaccattgaagccaccagcgtaaaacaactggctgacgctggcgtgcgggtaggcgatacattgcgtattagcggtacgggaatgtgtaatattcgaacttccggaacctggagcgcgaaaaccaatagtccttttttaccgtttgactgcagccagatcatctggaacgacgcccgcagtttgccattaccagaatctgaactggtcaacaaagcgacggcattgactgaagcagttaatcgccagctgcaccctaaaccggaagatgaatctcgcgtcagtgccagtttacgtagtgcaattcaaaaatccggcatggtattgcttgatgattttggcgacattgtactgaagacagcggatttatgttctgccaaagatgactgtgtgcgactgaaaaatgcgctggtcaatctcggcaacagtaaagactgggacgcgctggtaaaacgcgccaacgccgggaagctcgatggcgtgaatgtgttattacgcccggtgagtgcggaaagcctggataacctggtggcaacctccaccgcgccgtttatcacgcatgaaacggcgcgagcggcacaaagtctaaacagtccggcccccggcggattcctgattgtcagcgacgaaggcagcgattttgttgatcagccctggcctagcgcaagtctttacgactacccgccgcaagaacagtggaacgctttccagaaactggcacaaatgctgatgcatacgccgtttaacgccgagggtatcgtcacaaaaatcttcactgacgccaatggtacgcagcatattggccttcatccgatcccggatcgttccggcctgtggcgctatctcagcaccacattgctgctactgacgatgctgggtagcgccatttacaatggcgtacaggcctggcgtcgttaccagcgtcatcgcactcgcatgatggagattcaggcctattatgaaagctgcctgaacccgcaactgatcacccctagtgaaagccttatcgaataacacgtttgcgcggcaggttatgctaccctgtcgcgcaaattgcttcactctggagatttccctcatgcatatcaacattgcctggcaggacgtagataccgttctgctggatatggacggcacgttgctcgacctcgccttcgataactatttctggcaaaagctggtgcctgaaacatggggcgcgaaaaacggggttacgccacaggaagcgatggaatatatgcgccagcaatatcacgacgtacagcatacgctaaactggtactgtcttgattactggagtgagcaactgggtctggatatctgtgcgatgaccaccgagatgggaccgcgtgccgtactgcgtgaagataccattccgtttcttgaggcactgaaagccagcggtaagcagcgaattttgctcaccaatgcgcatccgcacaacctggcggtaaaacttgagcataccggtctggacgcacaccttgatttattactttccacccacacatttggttatccgaaagaggatcagcggttatggcatgcggtggccgaagctacgggtctgaaagctgaaagaacgctgtttattgatgacagcgaagcgattctcgatgctgccgcgcaatttggtattcgttactgcctcggcgtgactaatcctgattccgggattgccgagaaacagtatcaacgccatccgagtctgaatgactaccgccgcctgatccccagcctaatgtgaaggagacgccatgaaagagaaacctgctgttgaggttcgactggataaatggctatgggctgcccgtttttataaaacccgcgcgctggcccgtgaaatgattgaaggcggtaaggtgcattacaacgggcagcgcagcaagccgagcaaaatcgtcgagctgaatgccacgctcactctgcgccagggaaatgacgaacgcacggtgattgtaaaggcgattactgaacagcgtcgccccgccagcgaggcagccttgctgtatgaagagactgcggaaagtgtagagaaacgcgaaaaaatggcgctggcacgtaaacttaatgccttaaccatgccgcacccggaccgacgcccggacaaaaaagagcgccgcgacctgttacgatttaaacacggcgacagtgaataactgtcacctgcaagagagatgattatgccgcaacatgaccaattacatcgctatctgtttgaaaactttgccgtgcgcggcgaactggtaaccgttagcgaaaccctgcaacagatccttgagaaccacgattatccgcagcccgttaaaaacgtgctggcagaactgctggttgcgaccagcctgttaaccgctacgctgaagtttgatggtgatatcaccgtacagctgcagggcgacggtccgatgaatctggcggttattaacggtaacaataaccagcagatgcgcggtgtggcgcgcgtgcagggcgaaattccagaaaatgccgacctgaaaacgctggtcggcaatggttacgtggtgatcaccattaccccgagcgaaggcgaacgctatcagggcgtagttggtctggaaggtgataccctggcggcctgcctggaagattactttatgcgttctgaacagctgccgacgcgcctgtttattcgcaccggcgacgtagacggcaaaccggctgcaggcggtatgttgttgcaggtaatgcctgcgcaaaatgcccagcaggacgactttgaccacctggcgacgctaaccgaaaccatcaaaaccgaagaactgctgaccttaccggcaaacgaagtgttgtggcgtttgtatcacgaagaagaggtgacggtttacgatccgcaggatgtggagttcaaatgcacctgcagccgtgaacgttgcgccgatgcgctgaaaacgctgcctgatgaagaagttgatagcatcctggcggaagatggcgaaattgacatgcattgtgattactgcggtaaccactatctgttcaatgcgatggatattgctgaaatccgcaacaacgcgtctccggcagatccgcaagttcattaatgagtatgtccggcagagagggctctgccggattttacgactaatacacctgatgcgctttgtcactcattcagattcacattcagcctttcaccatccactacaagatcgcgccacgctttaggcttcgtccccagttttccatccttcgcagctgtgagtaatttttctttcgttatttcgttcggaagtaaactcatatcaagcgcgtcccattcttttctgtcactgtcaaagccatagacaatgactctgtcatcattaaaagcaaacaggatccgctccgcctgaccatcactattcagatcttgctcgaccaggacgcaggcgtctttttcaatacaggtcatcacgttatagcgatcctggattaaggcgctccagaatgtcgcatcaggtttaacagaaccaggggcaattaacacattatcggctaatactttttcgcttacctgttgctgaagatgttgctctccatctaacgccatcagcagatcccgcgcgcgtttcgggtctttcataaacccggcatcgcttttcaggctctcaagcgcagcacgtccatagcgaccgctctgctcgagcatgtagatagttacctggtcactcgtgtttttgccgctctgataacgcgccatatggctgttcacgctaatgcgcatactgtccagcaccgggctattaagaagcaccagtatcaccaacaccaataagctaaccgcaaggttcactttgccctgaagaacaacgggattttgccctttacgccagacgatgctgacaaaataccccaggctccacaccagtaacaccagcaccgccagcacgccctgcaagcggtcgacagtccagccgtactgagcgacccgcagccataacgcccaggcggcgacgaacacatacagcggagcaaccagcaaagcggttttaatcaggcaacgcaacggccctgtccagggaagactcgctttttgcggatcgcggacaatagccattaagatcaattgcaaaaaggccagcgtcaacagcaacccggcggcggagatgtggcgagaaatcgcgctcaggcccgtaaacggcagggtgatgataaacatcagggttagcaaacttactaacggcagcaaccccgtggcgattaacgtgaacaacttttgaatagagtcgattaaacgactctgtgttcgcgcgaggatcaccgccagcgcggtaaccagacctaacgtgagataaataaaccagtcggttgcaaaaaagagcgtattgaaaaacgtgatgccaacaagtttaaacaactcactccacagtaaaagcaccagccacgtcaagccattggcgagaaaaatcaccagtaatataagtacgttatgccatacactctggtaaaaatagcgatagcggctactgtcattgcggatgcgaaggctttgttgtatccacggtagcaacaacattgccatcaacagcagatagcaaccaaaatcccaaagcgccttttcagctctccaggggttcatgccatcagtttgccacttcagccagccgctcatccccagcgtggcaataaacactagcgccagccatccccaaaggcgcttctgtttaaaagagatcacggagaagagtaaaacggaactaaacgcgacggtcgcaggcacgccataaacaatccaactgtgattttttccggaaagccaggcgatcagcaggtagcaaaccagaccctgaagtaatccggtagcaatcatcccccagcgtgttgcgggactaagttcaacgttatccatgttggttatccagaatcaaaaggtgggttaattatcgcatccgggcagtagtattttgcttttttcagaaaataatcaaaaaaagttagcgtggtgaatcgatactttaccggttgaatttgcatcaatttcattcaggaatgcgattccactcacaatattcccgccatataaaccaagatttaaccttttgagaacattttccacacctaaaatgctatttctgcgataatagcaaccgtttcgtgacaggaatcacggagttttttgtcaaatatgaatttctccagatacgtaaatctatgagccttgtcgcggttaacacccccaaaaagactttactattcaggcaatacatattggctaaggagcagtgaaatgcgcgttaacaatggtttgaccccgcaagaactcgaggcttatggtatcagtgacgtacatgatatcgtttacaacccaagctacgacctgctgtatcaggaagagctcgatccgagcctgacaggttatgagcgcggggtgttaactaatctgggtgccgttgccgtcgataccgggatcttcaccggtcgtagtccaaaagataagtatatcgtccgtgacgataccactcgcgatactttctggtgggcagacaaaggcaaaggtaagaacgacaacaaacctctctctccggaaacctggcagcatctgaaaggcctggtgaccaggcagctttccggcaaacgtctgttcgttgtcgacgctttctgtggtgcgaacccggatactcgtctttccgtccgtttcatcaccgaagtggcctggcaggcgcattttgtcaaaaacatgtttattcgcccgagcgatgaagaactggcaggtttcaaaccagactttatcgttatgaacggcgcgaagtgcactaacccgcagtggaaagaacagggtctcaactccgaaaacttcgtggcgtttaacctgaccgagcgcatgcagctgattggcggcacctggtacggcggcgaaatgaagaaagggatgttcagcatgatgaactacctgctgccgctgaaaggtatcgcttctatgcactgctccgccaacgttggtgagaaaggcgatgttgcggtgttcttcggcctttccggcaccggtaaaaccaccctttccaccgacccgaaacgtcgcctgattggcgatgacgaacacggctgggacgatgacggcgtgtttaacttcgaaggcggctgctacgcaaaaactatcaagctgagcaaagaagcggaacctgaaatctacaacgctatccgtcgtgatgcgttgctggaaaacgtcaccgtgcgtgaagatggcactatcgactttgatgatggtagtaaaaccgagaacacccgcgtttcttatccgatctatcacatcgataacattgttaagccggtttccaaagcgggccacgcgactaaggttatcttcctgactgctgatgctttcggcgtgttgccgccggtttctcgcctgactgccgatcaaacccagtatcacttcctctctggcttcaccgccaaactggccggtactgagcgtggcatcaccgaaccgacgccaaccttctccgcttgcttcggcgcggcattcctgagcctgcacccgactcagtacgcagaagtgctggtgaaacgtatgcaggcggcgggcgcgcaggcttatctggttaacactggctggaacggcactggcaaacgtatcagcattaaagatacccgcgccattatcgacgccatcctcaacggtagcctggataatgcagaaaccttcactctgccgatgtttaacctggcgatcccaaccgaactgccgggcgtagacacgaagattctcgatccgcgtaacacctacgcttctccggaacagtggcaggaaaaagccgaaaccctggcgaaactgtttatcgacaacttcgataaatacaccgacacccctgcgggtgccgcgctggtagcggctggtccgaaactgtaatgatttgaagctggagaatatctatccagtatcttatagaaagcaaaacgggaggcaccttcgcctcccgtttatttacccttcttttgtcgtgccctgcgcccgcgttaccggcactggcagccaggcgcgaatggaaagcccgccccgctcgctggtgccaagctccagcatcccgttatggttatccacgatacgctgcacaattgccagccctaatcccgtgccgctaatggtgcgcgcactgtcgccgcggacaaacggctggaacaggtgcttacgttgttccggcgcaattcccggaccgtcatcttccacctggaaccaggcgcgattcggctccgttccgctgctgactttgatccagccattgccataacgggcggcgttgaccaccatattcgccaccgcgcgtttgatgctcagcgggtgcattttcacttcaatgctgccggggtaaagcgcggtttcaatttcccgctcatagccactttcggcagcaatcacctcaccgagtactgcattaagatccgccatttccatcggcatctcctgcccggtgcgcaggtagtcgataaactgctcaatgatggcgttgcactcttcgatatctttattgatgctttctgccagatagccatcctgctcgctcatcatctcagtcgccaggcgaatacgcgtcagcggcgtgcgcaagtcgtgacttacccccgccatcagcagcgtgcggtcatccgccagttgcttaacaccagccgccatatggttaaaggcacgggtaacggaacgcacctcgctagcgccatactcacgcagcggcggcggaataatccctttaccaacctgcaaggctgcgtgttcgagatcgaccaacggtcggttctggatacgaataaacagccacgccccgcctatcgccaatagcataatcgccagcgtatagcggaacagcggagagaaatcgccctgatgaatttcggtcagcggcacgcgtacccagatattggggctcagccaggttttcagccagacgacagggctacttttgttgacctcaacgcgcacttccgtcgggccgcccagttgctgcgccatctgatggcttaagaattcatagtgttgcgcccaacgcagacctgcctcttcggcagcctcgttggagtagagagagatccccagctcacggtagatctcccgacggaaagcgggaggcacaaccaactgcgtgccgtcctccagttgcagtttgtcggtcatcaacatacgcacttcgtacgcgaggactttattaaactgctggaggctcggcaaaatcgcgaagttcagcaccaccagataagtcgtcaccaggctggcgaacagcaaggtgacgatgagcaataacgtacgggcaaaactacttcgtgggctgaagcgcaatcgcctcatgctttagagccgtccggtacaaagacgtagcccagaccccagacggtctgaatgtaacgcggatgcgctggatcttcttccaccatgcggcgcagacggctaatctgcacgtcgatggagcgttccattgcggaatattcacgaccacgggcaaggttcatcagcttatcgcgggagagcggctcacgcggatggctgaccagtgccttcagtaccgcaaactcaccgctggtgagcggcatcggctcgtcttcgcggaacatttcgcgcgtaccgaggttaagtttgaacttaccgaaagcaattaccgcctcttcctgactcggtgcgcctggcagttcgttcgcctgacgacgcagcaccgcacggatacgggccagcagttcacgcgggttaaacggttttggaatgtagtcgtcagcgccaatctccaggcctacgatacggtccacttcttcccctttcgccgtcaccataatgatcggcatcgggttgctctgactacgaagacgtcggcaaatgctcaagccatcttcaccaggtaacattaaatccagtaccataagatggaaagattcacgagtcagcaggcgatccatctgttctgcattagcgacgcttcgaacctggaagccttgttcggtgagataacgttccagcagcgcacgcaggcgcatgtcgtcatcgaccaccagaatcttgtagttctcttgcattgtttgtactcccaaaggttcgcaacaatttgtaagcgtgtattcttaaaaaagctcacgttcgtcaccagctaaatctggtatgaatttcagcctaaattgttacaaagcatattaaacagcagcttaagtatacaatttattcggcgaaacattattgattctgttgatatgatcacgttatacccaatgtgcgcattatcaaacagacaaagggaatcaacgagatgaaaacgcccctggttacccgggaagggtatgaaaaactcaaacaagagcttaattatctctggcgtgaagaacgcccggaggtcacaaaaaaggtgacctgggccgcaagtctgggcgaccgcagcgaaaatgctgactatcagtataataaaaagcgtctgcgtgaaatcgaccgtcgcgtgcgctatctcactaaatgcctggaaaatctcaaaatcgtcgattactcccctcagcaggaaggcaaagtcttttttggcgcgtgggtggagattgaaaacgacgatggcgtgactcaccgtttccgtattgtcggctacgatgaaatttttggccgtaaagattacatctctatcgattccccgatggcccgcgcattgctgaaaaaagaagtcggcgatctggcggtggtgaatacccctgccggggaagcgagctggtatgttaatgctatcgagtacgtgaaaccgtaaggaagagtcttaacctcctgccgatggctggcatttttgccagccagtccgtataactatcccctgatttttgatccgaaaagatgaactcaaaccatgatgaatgatagcttctgccgcattattgcgggtgaaattcaggcgcgcccggaacaggttgacgctgccgttcgcctgcttgacgaagggaataccgtgccgtttatcgcacgttatcgtaaggaaatcaccggcggtctggatgacacgcagctgcgtaatctggaaacgcgtctgagctatctgcgcgagctggaagagagacgtcaggcgatcctcaagtccatttccgagcaaggcaaactcaccgatgatctggcgaaggccatcaacgccaccctaagcaaaaccgaactcgaagacctctacctgccctacaaacctaaacgccgcacccgcgggcaaatcgccattgaagcagggcttgagccgttggctgacctgctgtggagcgatccgagtcacacgccagaagtcgccgctgcacaatatgtttatgccgataaaggcgtggcagataccaaagccgcgctggatggcgcgcgctatatcctgatggaacggtttgccgaagatgccgcgctgctggcgaaagtgcgtgattatctgtggaagaacgcgcatttggtttctacggtggtgagcggtaaagaagaggaaggggcgaaattccgcgactatttcgatcatcacgaaccgttgtccacggtgccttctcaccgcgcgctggcgatgttccgtgggcgtaacgaaggcgtacttcagcttagcctgaatgccgatccacagttcgatgagccgcccaaagagagctattgcgagcaaatcatcatggatcaccttggcctgcgcctgaacaatgccccggcggatagctggcgcaaaggcgtggtgagctggacgtggcgcatcaaggtgctgatgcatctggaaaccgaactgatgggcaccgtgcgcgaacgtgcggaagatgaagcaatcaacgtctttgcccgtaacctgcacgatctgctgatggcggcccctgccggactgcgtgcaacgatgggcctcgatccgggtctgcgtactggggtaaaagtggcggtggtcgatgccactggcaaactggtggcgaccgacaccatttacccgcacaccggacaggccgcaaaagcagcgatgaccgttgctgcgctgtgtgaaaaacataacgttgaactggtagcgatcggtaacggtacagcttcccgcgaaactgagcgtttctatctcgatgtgcagaagcagttcccgaaagtgaccgcgcagaaagtaatcgtcagcgaagcaggcgcgagcgtttacagcgcttccgagctggctgcacaggagttcccggatctcgacgttagcctgcgtggcgcggtgtctatcgcccgccgtttgcaggatccgctggcggagctggtgaaaatcgatccgaaatctatcggcgtaggtcagtatcagcatgacgtcagccagacgcaactggcccgcaaactggacgcagtagtagaagactgcgtaaacgccgttggcgtcgatctcaacactgcttctgttccgctgttaacccgcgtggcgggcctgacgcgcatgatggcgcaaaacatcgttgcctggcgcgatgagaacggtcagttccagaaccgtcagcaactgttaaaagtgagccgtctggggccgaaagccttcgagcagtgcgcgggcttcttgcgcattaaccacggtgataacccgctggacgcgtctaccgttcacccggaagcctatccggtggtggaacgcattctggcagcaacacagcaggcactgaaagatctgatgggtaacagcagcgaactgcgtaacctgaaagcgtctgactttactgatgagaaattcggtgtgccgacggtaaccgacatcatcaaagagctggaaaaaccgggtcgcgatccgcgtccggaatttaaaaccgctcagtttgccgatggcgtcgagacaatgaacgacctgcaaccgggtatgatcctcgaaggcgcagtgaccaacgtcaccaactttggcgcgtttgtcgatattggcgtgcatcaggacggcctggttcacatctctagtttgagcaacaagtttgtggaagatccgcataccgtggtgaaagcgggcgacattgtgaaggtgaaagtgctggaagtggatcttcagcgtaaacgtatcgccctgactatgcgcctggatgagcagcctggcgaaaccaacgctcgtcgcggcggcggtaatgaacgcccgcaaaacaaccgcccggcagccaaaccacgcggtcgtgaagcgcagcctgccggtaatagcgcgatgatggatgcgctggcggcggcaatgggcaaaaaacgttaaacgcccgtactggcctacggttcgaatttgcacgaaatcgtagggcagataaggcgttcacgccgcatctggcaacgaacgccttgcctgacataaaagtgccggagaatatctccggcatttttattccacagccaaactcataatatattccggcaatatttatcatttcattaacaactgaaaccttaattaaacattagccagtccgggtaattcactattcgaattatattttcgctgcgatataaccttgagccacatcaacattgagtcagattattattcaaaccaacattcgcacacattttaagtattgctgatagaaaccattctcattatcattgtgttgttgattatttaatctctcctttgttggcaaatcatctggtctcatgtcgctgtcaaacgccccatgaggtagttatccagttaatgagaaacaagtaggcacctatgcaatacactccagatactgcgtggaaaatcactggcttttcccgtgaaatcagcccggcatatcgccaaaaactgctttctcttggcatgttacctggctcctcttttaatgtggtgcgcgtcgctccactcggcgaccccattcatatcgaaacccgtcgtgtgagcctggtattacgcaaaaaagatctggccttattagaagtggaagcggtttcctgttaatacggtgataacaacaatgaaaaaattaaccattggcttaattggtaatccaaattctggcaagacaacgttatttaaccagctcactggcagtcgtcagcgtgtaggtaactgggctggcgttaccgtcgaacgtaaagaagggcaattctccaccaccgatcatcaggtcacgctggtggacctgcccggcacctattctctgaccaccatcagtagccagaccagcctcgatgagcaaatcgcctgtcactacattttgagtggcgacgccgacctgctgattaacgtggtggatgcgtctaaccttgagcgtaacctgtacctgacgctacaactgctggaactcggcattccctgcattgtggcactgaacatgctcgacattgccgagaagcaaaatattcgtattgaaattgatgctctgagcgcgcgtctgggctgtccggtgatcccgctggttagtacccgtggtcgcggtattgaagcgctcaagctggcgattgatcgctataaagctaacgagaatgtggaactggtgcattacgcacagccgctgctcaacgaagcagatagtctggcaaaagtgatgccttccgacatcccgctgaaacaacgtcgctggctgggcctgcaaatgctggaaggcgatatctacagccgcgcctacgccggtgaagcgagccagcatctggatgccgccctcgcccgtctgcgtaatgagatggacgatccggcgctgcacattgccgatgcgcgttaccagtgcattgctgccatctgtgatgtggtaagcaacaccctgacggcagaacccagccgtttcaccactgcggtagataaaatcgtgctcaaccgtttcctcggtctgccgattttcctctttgtgatgtacctgatgttcctgctggctatcaacatcggcggggcgttacagccgctgtttgacgtcggctccgtggcgctatttgtgcatggtattcaatggattggctacacgctccacttcccggactggctgactatcttcctcgcccagggcctgggtggcggcattaacaccgtgctgccactggtgccgcagattggcatgatgtacctgttcctctccttccttgaggactccgggtatatggcgcgtgcggcgtttgtgatggaccgtctgatgcaggcgctgggcttgccggggaaatcctttgtgccgctgatcgtcggtttcggttgtaacgtaccgagcgtaatgggtgcacgtacgcttgatgcaccgcgtgaacgtctgatgaccatcatgatggcaccgtttatgtcctgcggcgcgcgtctggctatcttcgcagtattcgcggctgccttcttcgggcagaacggtgcgctggcggtcttcagcctgtatatgctgggtattgtgatggcggtgctgactggcctgatgctcaagtacaccatcatgcgcggtgaagcgacgccgtttgtcatggagttgccggtctatcatgtaccacacgttaaaagcctgattatccagacctggcagcgtctgaaaggcttcgttctgcgtgctggtaaagtgatcatcatcgtcagcattttcctgagcgctttcaacagcttcagcctgagcgggaaaatcgtcgataacatcaacgacagcgcgctggcgtccgtcagccgggtgatcaccccggtcttcaagccaattggcgtgcatgaagataactggcaggcaacggttggcctgtttacaggtgccatggcgaaagaagtggtagtgggtacgctcaacaccctctacaccgcagaaaatattcaggacgaagagttcaatccggcagaatttaacctcggtgaagagctgttcagtgcgatagatgaaacctggcagagcctgaaagacaccttcagccttagcgtactgatgaaccccattgaagccagcaaaggcgacggcgaaatgggtaccggggcgatgggcgtgatggatcagaaattcggtagcgcagcagcagcttacagctacctgattttcgtcctgctgtatgtaccatgtatcagcgtgatgggggctatcgcccgtgaaagtagccgtggctggatgggcttctccatcctgtgggggctgaatatcgcttacagtctggcaacattgttctatcaggtcgccagctacagtcagcatccaacttacagcctggtgtgcattctggcggttatcctgtttaacatcgtggttatcggtctgctgcgccgcgcgcgtagccgggtggatatcgaactgctggcaacccgcaagagcgtaagcagttgctgcgcagccagcaccaccggtgattgccattaatggctagtcttattcaggtgcgcgatttgctggcgttacggggccgtatggaagcggcccagataagccagacattgaacactccacagccaatgattaacgccatgctgcaacaactggaaagtatgggcaaagccgtgcggattcaggaagaacctgacggctgcctctctggcagttgtaaaagctgcccggaaggaaaagcctgtctgcgcgagtggtgggcgctgcgttaaccttactccatcgcctgttttggaaagcccggtatgcgtctgcatccgggcttttttgcgtgcggctttccataaaaatgcaactcttgcagcacggcgtaagttcctttgaaagcatctcgcagggatgaaaactcgctaatacacaggtgtggagtggcgcgtagagtcgcggcattcaaacaacaggtgaaggaacgccatgagcaaaaagcagagttccaccccacacgatgcgctgttcaaactctttttacgccaaccggacacggctcgtgattttcttgcgtttcatttaccggcacccattcacgcgctttgtgatatgaaaaccctcaagctggagagcagcagctttattgatgacgatctgcgtgaaagctattccgatgtgctgtggagcgtgaaaacggaacaaggaccaggatacatctattgtctgattgaacatcaaagcaccagtaacaaactgatcgcatttcgcatgatgcgttacgctattgccgcaatgcaaaatcaccttgatgctggatacaaaacgttgccgatggtggtgccattgttgttttaccacggtattgaaagcccctatccctatagcctgtgttggctggattgtttcgccgatcccaaactggcaaggcagctttatgcctccgcatttccgctgattgatgtcaccgtcatgcctgatgatgaaatcatgcagcaccgacgtatggcgctgctggagttaattcaaaaacatattcgtcaacgcgacctgatggggctggtagagcaaatggcctgcttattaagtagtggatacgctaatgacagacaaatcaaagggctgtttaattacatactgcaaactggcgacgctgtacgttttaacgattttatcgacggcgttgccgaacgtagtccgaaacacaaggagagtttaatgactattgcggaaagattgcggcaggagggggaacaatccaaagccctgcatatagccaaaataatgcttgaatccggagttcctcttgcagacatcatgcgctttaccgggctgagtgaagaagagttggctgcggcgagtcagtaaagttctgtctcgccatttcaaaagccacttacaccctctgcttcaacgccaccagcaggtgacaaaactcggccggatggctaataaatggcgcatgggccgctttggcgaagatataactttcgctgtgaggccaaagtttatccagcatcggcaccactttgcgcggcaccagaccgtcgagatagccatacaatcgcaaaaacggcatggacacgttttgcagcggctgacggagatcgaccgttttcaggatttccagcccgccattaagcacgtcaacctccggcatcggtaacgccagaacggttttcttcaacgcccgcgcatcctggcgcgccgtttcagtccccatggtttgtaacgccaggaaccgctccactgtacgctgaaaatcatcactgagttgctgctgaaatcccgccagcacgtccggttttatccccggccactcgtcacgagcactaaaacaaggactgctcgccacggtgaccagcgcctgaacacgctcgggatgggttaacgcaatctggcttgccaccagcccgcccagactccagcctaaccaaatggctttatcaggtgcctgttgcagcacggcttcggccatatcagcaagactcagcgcaccaaatccccggctacgcccgaagccgggcaggtcaacaaggtgcagcgtaaaatggctgctaagttcctcgtcaatgcaacgccacacttcggcattcagtccccatccgtgcagcagcacaagatgaacattcccctgacctttggtctgccaccagatgttattcatccgctattgttctcttttgacttacaaggatgaacatatgctaacagtaccgggattatgctggctatgccgaatgccactggcgttaggtcattgggggatttgtagcgtctgtagtcgcgccacccgcacagataaaacgttatgcccacaatgtggattacccgccacacactcccatcttccctgcggtcgctgcctgcaaaaaccgccgccctggcaaagactggtcacggttgccgactatgcgccgccgttaagtccgcttatccaccagcttaaattttcccggcgcagtgaaatcgccagcgccctgagtcgtctgttactattggaagtcttacacgctcgtcgcaccaccgggttgcaattgccggatcgcatcgtcagcgttccgttatggcagcggcgtcactggcgtcggggatttaatcagagcgatttgctgtgtcagccgttaagtcgctggttgcactgccaatgggatagcgaagccgtcacacgtacacgggccactgcgacccagcattttctcagtgcccggctgcgcaagcgcaacctgaaaaatgcctttcgtcttgaattgcccgtgcaaggtcgccatatggtgattgtggatgatgtcgttaccaccggaagtaccgtcgcagagattgcgcagttgcttttacgcaatggtgcggcggctgtccaggtctggtgcctttgtcgaaccttgtaaagcctcgatgatgggcgtattataaccaactaaaatagtcaactattaggccattactatgatccgtatttccgatgctgcacaagcgcactttgccaaactgctggcaaatcaggaagaagggacacaaatccgcgtatttgtgattaaccctggcacgcctaacgctgaatgtggcgtttcttattgtccgccggacgctgtggaagccaccgacacagccctgaaatttgacctgctgaccgcgtatgttgatgagttaagcgcaccatacctggaagatgcagagatcgattttgttaccgaccagttgggttcccagttaacgctgaaagccccgaacgccaaaatgcgtaaagtggcagacgatgcaccgctgatggagcgcgtggagtatatgctgcagagccagatcaacccacagcttgctggtcacggtggtcgcgttagcctgatggaaatcaccgaagacggttacgccattctgcaatttggcggcggctgtaacggttgttccatggtcgatgtgacgctgaaagaagggatcgagaagcagctgctgaacgaattcccggagctgaaaggtgtgcgcgatctcaccgaacaccagcgcggcgaacactcctactactaagttatcccctcttttgtagattgcccgatgcgacgctaaagcgtcatttcgggcctacgttgaacatgtgccagacgttggcgcagcattgctttgtcaaatcctcggttcgtttccccgcgataatatgaccaacctctcataatttaaatttaccccgctctggtgattctcaaacgccagatgttacccgtatcattcacatgggtaccaaacatactcctgacatctgactacaataattagttttagtgggtatcagtcgtggtgccgcaatatctctgttcccgattgggataattagagtttgtcgtcagaaaattgacgttacccataacaaatgaaaggccaggtaaatcatgccattagtcattgttgctatcggtgtaatcttgttgttgctcctgatgatccgcttcaaaatgaacggcttcatcgctctcgtcctcgtggcgcttgctgttggattaatgcaaggaatgccgctggataaagttattggctccatcaaagccggtgtcggcgggacgctcggtagccttgccctgatcatgggttttggcgcaatgctgggcaaaatgctggcagactgcggtggcgcacaacgtatcgccaccacgctgattgccaaatttggtaaaaaacacatccagtgggcggtggtactgaccggttttaccgttggttttgccctgttctatgaagtgggctttgtgctgatgctgccgctggtgtttaccatcgcggcttctgcgaatattccactgctgtatgttggtgtaccaatggcggctgcactgtctgtgacccacggcttcctgccaccgcatccgggtccgactgcgattgccaccattttcaatgccgatatgggtaaaaccctgctgtacggtactattctggcaatcccgaccgtgattctcgccggtccggtttacgctcgcgtgttgaaaggtatcgataagccaattccggaaggtctctacagcgcgaaaaccttcagcgaagaagagatgccgagctttggcgtcagcgtctggacctctctggtgccggtagtactgatggcgatgcgtgcgattgccgaaatgatcctgccgaaaggtcacgctttcctgccggtagcggagttcctcggtgacccggtaatggcaacgctgattgccgtgctgattgcgatgttcacctttggtctaaaccgtggtcgtagtatggatcagattaacgacacgctggtttcttccatcaaaatcattgcgatgatgctgttgatcatcggtggtggcggtgcgttcaagcaggtgctggtagacagcggcgtggacaaatacattgcttccatgatgcacgaaaccaacatttctccgctgctgatggcctggagcattgctgccgtactgcgtatcgcgctgggttccgcaaccgttgcggcaatcactgcgggtggtatcgcggcaccgctgattgcaacgacgggtgttagcccggagctgatggttattgcggttggttccggtagtgtgattttctctcatgtgaacgatccgggcttctggctgttcaaagagtactttaacctgactatcggcgagaccatcaaatcctggagcatgctggaaaccattatcagcgtgtgcggtctggtaggctgtctgctgctgaatatggtgatttgataacactgactgccggatgcggcgtgaccgccttatccggcctacgattcgggatgaattagtaggccggataagacgcgtcaagcatcgcatccggcatcaaccgcactttacttcttcttcgctgcagctctgcgccgtctgtccaaatccttcagcaacttgttcacgccatcatcggcaaacatgctctcaagcgttgcggaaagcttgcgtcgccagtttttatactggtaactggtgccaggaatattcaccggttcggccatatccagccagtcttccggctgtagtcctaacagagcactgttactgtcggcaatgtagcgctgcaaaccacggttcagcgtcggcgtcatgctcatcaagcttgccttatgcccggcacgtttcggcagacaaccatatttatgcagtgcatccagcagcccttgcttcgccagttcgcgatcctgatacagaccgcgcagtaccacttcatccggatacagccccagggttttgcccagcgttagatccccgcactcccagtaaccgcgcagcgttggcaggtcatgtgtcgccgcaaccgccatgctctgctccggatacgctttcggtgcacggaacgtcttctcgtggtcgttttcgaaatagagcactttgtaagagtacacaccgctgctgcgcagcttaccgacaatctctaccggtacggtaccgagatcttcaccaatcaccatacagcgatgacgtttactttcgagtgccagaatgctgagcagatcatccaccggatagtgaacatacgcgccctgatctgccgtctcgccatacggtatccaccacaaacgcagcatgctcatcacatggtcaattcgtaatgcgccgcagttttgcatattggcacgcaacagctcgataaacggttcataggcacgcgcggtgatgatatgcgggtccattggcggtaatccccagttctgccccaacgggccgaggatatccggcggcgcgccaacgcttgctttcaggcaatatagttcacggtcacaccaggtttccgccccaccttccgctacgccaaccgccagatcacgatacaagccaatcggcatttcatagccctggcttatctcccagcaggcggcaaactggctgtaagccagccactgcaaccagagataaaaatcgacgtcatcacgatgttcttcgcagaactgacgcacttctggactatccacgttctgatacatctctggccatgcaggccagccccagcgcatttcgtcctctttcacttgctgggcatgtagcgcatcaaaggctgcctgccagaacaggctgtcgccctgctctgcaacaaactggcgaaacgcggccatctgctcatcatcacgttgcgcgaaacctttccacgccattcgtaatgctgtcatttttagggcggtaaccgtggagtaatcgacccagtcggcatcgcgcgcctgttgcagcgtctgttgcgtggtcggcaactgccaccaggcctgagcctcttcgctaagatggaaatcttcaacggcgttaacgtcgatataaatcacattcagccaacggcgagaagacgggctgtatgggctggcgctctccggatttgccggatagagcgcatgaatcgggttcaggccaatgaagctcccgccacgttttgccacatccaccagcatcgctttgagatcgccaaaatccccaataccccagtttttttcgcttcgcagcgtataaagctgaacgcaggcaccccacagcttttgtttattcagcaacgcctgcggttcgtaacagcgtttcggggcgacaatcacccggcaatgcgcgcgctggtcgtcctgggtgagtgtcagcgtgtgataaccttccggcagcttcgtcggtagattgaacgctttgccccccgttacatggcctttgtactgcgttccttcttcggtggtcagcagccagctatattcgccgctgccctccaccaccatcggcatttttttgccgctggtataaaccatgacattcgggactggcgttaccgccactttcgtggcggtacgttgatgcatcgcgtcaagcaaacgccgtttggtttcggcgctaatgctctgcggtttaccgtgggcattgatgtaattggggctaatccccgccgccagcgcggcattatccagacgtttgctttccatcgagcttccttagcgttttgcctgccagatacgagcctgataatcgcgaatagagcgatcgctgctaaacataccgcagcgggcggtattgaggatcgccgcgcgagtccaggcctcctggtcgcggtacagcacatccacctgcttttgtgcctctacataggctgcgaaatccgccatcaccagatacggatcgccgccctgtttgccgatactgtgcagcatctggtcgaaggcatgcttatcgccgtcgctgtatttaccgctttccagctctttcaatactgcgtccagcaccttatctttcttccgccatttcaccgggtcgtagcctttggccagaattgccttcacttgttccacggtatgaccaaaaataaagatattttcttcaccgactttctcggcgatttcaacgttcgccccatccagcgtaccgacagtaagcgcaccattgagcgccagtttcatattgccggtaccggaagcttctttacctgcagtgctaatttgttcggagatatccgccgccgggatcagtttttccgccgcgctaacgcaataatccggcaggaacaccaccttcaacttatcgccaaccagcggatcgttgttgatcacgtcagccactttgttgatcgcaaagataatattcttcgccaggtagtagcccggtgccgctttcgcgccgaagaggaagacgcgcggtacgcgatcagcctgcgggttttcacgaatttctttgtacaacgccagaatatgcagcagattcaggtgctggcgtttgtactcatgcaaacgtttgatctgaatatcgaaaatcgcctgtggattgatctcaataccggtacgaactttcacaaactccgccagacggactttattcgcctgcttgatctcgcgatattgctgacggaatttcgcatcatcagcgaatttttccagattgatcagctgatcgagatcgttagcccactctttttgcagacttttatccaacagagccgccagtgccgggttgcactgtttgatccagcgacgtggggtaataccgttggtgacgttatggaatttgttcggccatagctggtgatattccgggaacagatctttcaccaccagatcgctgtgcagcgccgcaacaccgttcaccgcgaaaccgccaaccacacacaggttcgccatatgcacttgtttgtcgtgcaccaccgccagtttggcccacactttttcatcgcccggccaggttttctctaccagcgttttaaagcgagtattaatttcgttaataatctgcatgtggcgcggcagtaagcctttcaccagtttcacatcccagcgttccagcgcttctggcatcagggtatggttggtgtaagcgaaagttttgctggtaatggcccaggcgtcatcccagctcatctggtgctcatcgatcagcacgcgcagcagttctggaatcgcgatagttgggtgggtatcgttcagctgaataacttcgtaatccgccagttcgtgcagtttacgccccgccagatgatggcgacgcaaaatatccgctacgctacaggcacactggaagtattgctgcatcaggcgcagctttttaccggcagtatggttgtcgtttggatagagaactttggtcagtttttccgcattgatgccctgctgttcggcacgcaagaaatcaccgtcgttaaatttagtcagatcaaacggatgcgcgtgcgtcgcctgccacagacgcagcggctgcgccacgccattacgatagccgacaacggggagatcccacgcttgaccggtaatggtaaactccggctcccagcgtccgtctttcgtcactttaccgccaatccctacctgcacatccagtgcttcgttgtggcggaaccacgggtagttactgcgatgccagtcatccggcgcttcaacctgtttgccatcgacaaaagactggcggaacaaaccatattgatagttcagaccgtaacccgtcgcagactgaccgacagttgccatactgtcgaggaagcacgccgccagacgtcccagaccaccgttacccagcgccgggtcgatctcttcttccagcaggtccgtcagattgatgtcataagccttcaagctatcctgtacatcctgataccagccgagattcaacaggttgttgcccgtcaggcgaccaatcaaaaactccatactgatgtagttaacatgtcgctgattcgccaccggcttggcgaatggctgagcacgcagcatttcggccagtgcttcactcactgctagccaccactggcgaggagtcatttcagccgcagaatttaagccataacgctgccactgacgactaagcgcttcctgaaattgcttatcgttaaaaataggttgactcataggagttccacttttcttagattttcaacacaacgttatcgctagtttgccaggctcgatgttgaccttcctcatcctgcgggggattaggcagggaggagttgcggggatgagcaaggaaatgtgatctcaaccacttaaagctagtgcaaaccacaggattagcatcaaatcaatgcaatacagcgcagaaaatctgtatctaagtgcaaaaaatggccgttgcgtattttcaaaaagcggaaggtaactctataaattaagtaaaggagtgaaacagtttcataagtaaaatatccagtgtgctccatctcattcttaatagatttattaagatcatctttttagatggcactttcatcaggaatgaagaagaaacccttgcttaaatgaatctgatgaacataagggaaaccagtattcacgctggatcagcgtcgttttaggtgagttgttaataaagatttggaattgtgacacagtgcaaattcagacacataaaaaaacgtcatcgcttgcattagaaaggtttctggccgaccttataaccattaattacgaagcgcaaaaaaaataatatttcctcattttccacagtgaagtgattaactatgctgattccgagtaaactaagtcgtccggttcgactcgaccataccgtggttcgtgagcgcctgctggctaaactttccggcgcgaacaacttccggctggcgctgatcacgagtcctgcgggctacggaaagaccaccctcatttcccagtgggcggcaggcaaaaacgatatcggctggtacagcctggatgaaggtgataaccagcaagagcgtttcgccagctatctcattgccgccgtgcagcaggcaaccaacggtcactgtgcgatatgtgagacgatggcgcaaaaacggcaatatgccagcctgacgagtctcttcgcccagcttttcattgagctggcggaatggcatagcccactttatctggtcatcgatgactatcatctgatcactaatccagtgatccacgagagtatgcgcttctttattcgccatcaaccagaaaatctcaccctggtggtgttgagtcgcaaccttccgcaactgggcattgccaatctgcgtgttcgtgatcaactgctggaaattggcagtcagcaactggcatttacccatcaggaagcgaagcagttttttgattgccgtctgagtagcccgattgaagccgcagaaagcagtcggatttgcgatgacgtttccggttgggcgacggcactacagctaatcgccctctccgcccggcagaatacccacagtgcccataagagcgcacgccgcctggcgggaatcaatgccagccatcttagcgattatctggtcgatgaggttttggataacgtcgatctcgcaacgcgccattttctgttgaaaagcgccattttgcgcagtatgaacgatgccctcatcacccgtgtgaccggcgaagaaaacgggcaaatgcgcctcgaagagattgagcgtcaggggctgtttttacagcggatggatgataccggcgagtggttctgctatcacccgctgtttggtaacttcctgcgccagcgctgccagtgggaactggcggcggagctgccggaaatccaccgtgccgccgcagaaagctggatggcccagggatttcccagcgaagcaattcatcatgcgctggcggcaggcgatgcgctgatgctgcgcgatattctgcttaatcacgcctggagtctgttcaaccatagcgaactgagcctgctggaagagagccttaaggccctgccgtgggacagcttgctggaaaatccgcagttggtgttattgcaggcgtggctgatgcaaagccaacatcgctacggcgaagttaacaccctgctagcccgtgctgaacatgaaatcaaggacatcagagaagacaccatgcacgcagaatttaacgctctgcgcgcccaggtggcgattaacgatggtaatccggatgaagcggaacggctggcaaaactggcactggaagagctgccgccgggctggttctatagccgcattgtggcaaccagcgtgctgggtgaagtgctgcactgcaaaggcgaattgacccgcagtctggcgctaatgcagcaaaccgaacagatggcacgccagcacgatgtctggcactacgctttgtggagtttaatccagcaaagtgaaattctgtttgcccaagggttcctgcaaaccgcgtgggaaacgcaggaaaaagcattccagctgatcaacgagcagcatctggaacagctgccaatgcatgagtttctggtgcgcattcgtgcgcagctgttatgggcctgggcgcggctggatgaagccgaagcgagcgcgcgtagcgggattgaagtcttgagctcttatcagccacagcaacagcttcagtgcctggcaatgttgattcaatgcagcctggcccgtggtgatttagataacgcccgtagccagctgaaccgtctggaaaacctgctggggaatggcaaatatcacagcgactggatctctaacgccaacaaagtccgggtgatttactggcaaatgaccggcgataaagccgccgctgccaactggttgcgtcatacggctaaaccagagtttgcgaacaaccacttcctgcaaggtcaatggcgcaacattgcccgtgcacaaatcttgctgggcgagtttgaaccggcagaaattgttctcgaagaactcaatgaaaatgcccggagtctgcggttgatgagcgatctcaaccgtaacctgttgctgcttaatcaactgtactggcaggccggacgtaaaagtgacgcccagcgcgtgttgctggacgcattaaaactggcgaatcgcaccggatttatcagccattttgtcatcgaaggcgaagcgatggcgcaacaactgcgtcagctgattcagcttaatacgctgccggaactggaacagcatcgcgcgcagcgtattctgcgagaaatcaatcaacatcatcggcataaattcgcccatttcgatgagaatttcgttgaacgtctgctaaatcatcctgaagtacctgaactgatccgcaccagcccgctgacgcaacgtgaatggcaggtactggggctgatctactctggttacagcaatgagcaaattgccggagaactggaagtcgcggcaaccaccatcaaaacgcatatccgcaatctgtatcagaaactcggcgtggcccatcgccaggatgcggtacaacacgcccagcaattgctgaagatgatggggtacggcgtgtaagtttagccggataacgcgccagatccggcttacatctctgcatcattcaatgctcacccgcgttacgccatctgtttctatcaaactaaaccgcaccggcaagaaacgctccaccaccgcgatattggtcagcagatggcaactgggatgggcgaccgtaaattcccccgcgcccgccagcgccatcggtagcaccagttggtcagcaagatattcccccaccgccgccgtgcttgccaggtagcgtttcacctctttcaccaactgtgccgcaaccacctcggcactgacgcgcttttcaccgacgacaaaaaagcgttcggtgatattttcactttcgacttcaaggctgacggtattacccggcccctggtcgcgcggcaggttatgaatattctgttcatgcagggaaaaactccccgccagtgtagcgatttcacgctcagcaacatggcgcggcacaccagctaatagaacttctccacgcatctgcacaatgttcccgcgctcgccaagttgcaaggtgttaaagcttgccacggggctgacttccgttgccaccacaccgcctccggcagggtaaaaaccgtggcgtaacagcgtggtttgctgatgaattcctattttcgccagcagcggctccagcacccggcggataaaatccgcaggcggcgcgctcgggttatcggtgccgccgctcacttcaacacggctaggtccatcggcaaaccacagcgcgggcagcaccgtttgcagcaccagcgtacaacttccggcgctaccgatagcaaagcggtaatcgccgccgcgcacggtgccgggccggaagagcagacgctggctccccagctccgcgccttccacggttgctccgcaaatttccgtcgccgcctttaccgcggtcagatgctggcgcaacagccccggtttcgcccgcccggcacgaatgctggtgatggtaaatggctggccggttatcatgctcaggctcagcgcgctgcgcaggatctgcccgccaccttcgccctgtgcgccatccagcgcaatcatccttttcatcatttatccttttacgcacaccacctgacgcagggtatagataacttccaccagatcgctttgtgccgccatcaccgcatcaatatctttatacgccatcgggatttcgtcgatcacttcggcatctttacggcattccacatgcgcggtggcacgaatttgatcttccacgctgaacagttttttcgctttagttcggctcattacccgcccggcaccgtggctgcagctacagaagctctcttcatttcccagcccacggacgataaagctttttgctcccatgctaccgggaataattccatattgaccagcacgcgcagacaccgcgcctttacgcgtcacgtagatctcttcaccaaagtgctgttctttttgcacatagttgtggtgacagttgatctcttccatcgccagcgtttgtggctgtctgaccgttttctgcgtaatgctctgcaatgccgttaccacgttttccatcatcgcatcgcggttaaggctggcaaaaagctgcgcccaggccacggctttcaggtaatcatcaaagtattccgtaccttccataaagtacgccagatcacggctcggcaacgtctcaagcgtttcctgcatctctttttgtgccagatcgataaagtaagtcccgatggcgttaccaattccgcgactaccggagtgcagcataatccacacctggtcgctctcatcaaggcagatttcaataaagtggttaccggttcccagcgttcccaggtgtttatagttattggtattcaggaaacggggatatttttgcgttaaccactgataaccggcttcaagctcagcccatttagcatcgacgttaacaggtggattttcccaggcacctttatcacgtttacaacggccagtggtacgcccgtgcggcacggccgtttcaatcgcctgacgcagctctgccaggttttcaggcaggtcttccgccgttaacgcggtacgcagcgcgttcattccacagccaatatccacgcccaccgccgccggaataatcgcccctttggtcgggatcacgctaccaatggtggaacctttacccaggtgtacatcaggcattaccgcaatatgtttgaaaataaacggcatcttcgccgtattaataagttgctgacgcgcatcggcctctaccggcacgcctttggtccacatttttaccggggcattttcagtggtcagtaattcgtaattcattttgtttttctcttttcgttgtttgctgtcctgataattgcaaccgtcgtgccagaaaattaaataagcagcttaattttttaattcattgttttaaaaaagattatatctttacgtccgtaaccggagatttcccgcaaagccaatttaccgataatgaaatatcgtcttttataaggatatctaagatgcgtaaaacagtggcttttggctttgtcggtaccgtactggattatgccgggcgcggcagtcagcgctggagtaaatggcgtccgacactctgtttatgccagcaagaaagcttggtcatcgatcgactggaattgttgcacgacgcccgcagccgcagcctatttgaaacgcttaaacgcgatatcgccagcgttagcccagaaacagaagtggtgagcgttgagattgaactgcataacccgtgggatttcgaagaggtctacgcctgcctgcatgatttcgcccgtggttacgagtttcagccagaaaaagaagactatttaattcacatcaccaccggtacccacgtcgcgcagatttgctggtttctgctggcagaagcgcgttacctgcccgcccggctgatacaatctagtcctccgcgcaaaaaagaacagccgcgcggcccaggtgaagtaacgattatcgatctcgatttaagccgttataacgccatcgccagccgctttgccgaggaacgccagcaaacgcttgattttcttaagtccggcattgccacgcgtaacccccacttcaaccgcatgattgagcagatcgaaaaagtggcgatcaaatcccgcgcgccgattctgcttaacggtccaaccggcgcgggcaagagttttctggcgcgacgcatcttagagttaaaacaggcgcggcatcagtttagcggcgcgtttgtggaagtgaactgcgccaccctgcgcggcgataccgccatgagcacgctgtttggtcatgtaaaaggcgcgtttaccggggcgcgggaatctcgtgaaggtttattacgcagcgccaacggcggaatgttgtttcttgatgagattggcgaactgggcgcagacgaacaggcaatgctgctgaaagccattgaagagaaaaccttttacccgtttggcagcgatcgccaggtgagcagtgattttcagcttatcgccggaacggtgcgcgatttgcgccagctggttgccgaaggcaaatttcgcgaagatctgtacgcgcggatcaatctctggaccttcaccctgccgggtctacgccagcgccaggaagatattgaaccgaacctggattatgaagtggagcgccacgccagtctcactggcgacagcgtgcgttttaacaccgaagcgcggcgcgcctggttggcttttgcgacctctccccaggcaacatggcgcggtaactttcgcgaactttctgccagcgtcacgcggatggccacctttgccactagcggacgcatcactctggacgtggttgaagatgagataaaccgtctgcgctataactggcaggagagccgcccctccgcgcttacggcgttgctgggcgcagaggcagaaaacatcgatctcttcgaccgtatgcaactggaacacgttatcgctatctgccgccaggcaaagagcctttccgcagccggacgccagctttttgacgttagccgccagggcaaagccagcgtcaatgacgcggatcggctacgcaaatacctggcgcgttttggtctgacgtgggaagccgtgcaggatcagcacagctccagttgaatatggtggtccgtcagcacctgcatcacgcttactggcggcggggcgtcggtgtagacggcatctaccatgctgatgctgcccatattgaccatcgcgttacggccaaatttcgagtgatcgacaaccagcataacgtggcgcgagttctcaataatggcgcgtttggtgcgaacttcgtggtaatcgaactccagcagcgagccgtcgctatcgatgccgcttatccccagaatgccgaaatcaaggcggaactgggagataaaatcgagcgtcgcttcgccaatgatcccgccatcgcggctgcgtaattcgccaccggcgagaatgatgcgaaaatcttcttttaccatcaacgtgttagcaacgttgagattgttggtgacaatgcgcaaattgctgtgattgagcagtgcgtgcgctaccgcttccggcgtggtgccgatatcgataaacagcgtcgagccattggggatttgctccgccactttgcgggcgatgcgctctttttcttcggtctgggtggccttgcgatcgtgccacggcgtgttaaccgaactggaaggcagcgccgcaccgccatgatggccaggatcaggttttgctccgccagctcattgaggtcgcggcgaatagtctgcgggctgacggagaaatgctctaccagctcttcggtactgacataaccctgctgtttaaccagttcgataataccgttgtgacgttgtgtttgtttcatttataaatccctggaattattttcgttttcgcgcattgaggctatcaacaaaagccatcgctaaacccacggctaacccggcgatgtgtgctccgttcgccatgctcatcccaaacaaatcaaaccatccggcgacaatccagatcagcgcaaagataattaacccacgttgcaggtaaatgccactttgcggatcgcgttcgccacgtagccagacgtagcccatcagcgcatacaccacgccagaaagcccgccaaaccacggcccgctgaatttttgctgcacatagccgcttaacagggcgctgataagcgtaatgacaattagcttaccgctaccgaggcgtttttccaccgcaccgccgagataccaccaccagagcaggttaaagaggatatgcatcaggctgaagtgcattaacgcgtgggtgaagtaacgccagaactcaaatttcagtgttggatcgaatggccaggccagccataacatcacttcctgatcgccgagaatttgcatggcaataaacaccaccacgcaggcgatcatcatcacccaggttaccggacctgcgcgttcacgcaaggcggcaaagaaaggataacggcgataatgcaggccactgccggtatggcctgcctgccagctcgccgccagataacgcggatctgccgggttttcgagaaaacgcgccagctccgcccgtacgcgctcggcctgggactcatccgccagccagacatcgctttggttatgttgttgaatcgtgaggataacaccctgcgtcgccatgtaatcaacaaacgcctgcgccacgcgggggttagcaaaagaggtaatcatcaacatcgttgctgtcgcttattccacacaaaaggggacagtataaagcgttacgcgccgtacgccacctctgcgggaaactgacgttgccaggcttcaaagccgccgtcaatgctatagaccacatcgtagccctgttgcagcagatactgcgccgcgcctttgctgctattgccgtgataacacatcaccatcaccggagtgtcaaagtcgttatcacgcataaaagcgcccagcgtgtcgttggttaaatggaaagcctgcaccgcatgtcccattgcgaaactctgtggatcgcgaatatcgaccagcaccgcctctttttcctgcaacttctggtgcgcgtcggcaacgttaatacattcgaactgatccatgcgtctctctttctttacaaacaagtgggcaaatttaccgcacagtttacgtcgaagcggcagataaacgccataatgttatacatatcactctaaaatgttttttcaatgttacctaaagcgcgattctttgctaatatgttcgataacgaacatttatgagctttaacgaaagtgaatgagggcagcatggaaaccaaagatctgattgtgatagggggcggcatcaatggtgctggtatcgcggcagacgccgctggacgcggtttatccgtgctgatgctggaggcgcaggatctcgcttgcgcgacctcttccgccagtagtaaactcattcacggtggcctgcgctaccttgagcactatgaattccgcctggtcagcgaggcgctggctgaacgtgaagtgctgctgaaaatggccccgcatatcgccttcccgatgcgttttcgcctgccacatcgtccgcatctgcgcccggcgtggatgattcgcattggtctgtttatgtacgatcatctgggtaaacgcaccagcttgccgggaagtactggtttgcgttttggcgcaaatagtgtgttaaaaccggaaattaagcgcggattcgaatattctgactgttgggtagacgacgcccgtctggtactcgccaacgcccagatggtggtgcgtaaaggcggcgaagtgcttactcggactcgcgccacctctgctcgccgcgaaaacggcctgtggattgtggaagcggaagatatcgataccggcaaaaaatatagctggcaagcgcgcggcttggttaacgccaccggcccgtgggtgaaacagttcttcgacgacgggatgcatctgcctagcccttatggcattcgcctgatcaaaggcagccatattgtggtgccgcgcgtgcatacccagaagcaagcctacattctgcaaaacgaagataaacgtattgtgttcgtgatcccgtggatggacgagttttccatcatcggcactaccgatgtcgagtacaaaggcgatccgaaagcggtgaagattgaagagagtgaaatcaattacctgctgaatgtgtataacacgcactttaaaaagcagttaagccgtgacgatatcgtctggacctactccggtgtgcgtccgctgtgtgatgatgagtccgacagcccgcaggctattacccgtgattacacccttgatattcatgatgaaaatggcaaagcaccgctgctgagcgtattcggcggtaagctgaccacctaccgaaaactggcggaacatgcgctggaaaaactaacgccgtattatcagggtattggcccggcatggacgaaagagagtgtgctaccgggtggcgccattgaaggcgaccgcgacgattatgccgctcgcctgcgccgccgctatccgttcctgactgaaagcctggcgcgtcattacgctcgcacttacggcagcaacagcgagctgctgctcggcaatgcgggaacggtaagcgatctcggggaagatttcggtcatgagttctacgaagcggagctgaaatacctggtggatcacgaatgggtccgccgcgccgacgacgccctgtggcgtcgcacaaaacaaggcatgtggctaaatgcggatcaacaatctcgtgtgagtcagtggctggtggagtatacgcagcagaggttaagcctggcgagctaaattaacgtaaggtgatcaggtcagatttcaatctggcctgagactgatgacaaacacaaaactgcctgatgcgctacgcttatcaggcctacgtggtttatgcaatatattgaatttgcatggtcttgtaggccagataagacgttcacgtcgcatccggcatgaacaaagcgcactttgtcaaaaatctaacctactttttaattcagggaattaccgcaaagcccacgccatcatacccaacgtaacaaaactcaggcacgttccccactcgcccgctgaaaaatagcattaatgcgcccagcgccagcataaaaattttgagcagaaggtaaattgttggcgtgataaggatattacaaacttcaataataccggcaagtccgacacccagcatggcaataaccaccgccaaaaattgcgccagtatggggatgccgaaaaaagtcattaccaggctggtcaaaatccattttctgttttgcattattctttccattctttttgaatggtgaaattatactccccgagtccccttgccccttctggacacttttccgaaatgatggcggaaaaaaacgggaccctttggccccgttctatttattggtgaacttacaatctcaccggatcgatatgccagatatgatcggcgtactctttgatagtacggtcagaagagaagtagcccatattggcaatgttcagcatcgcttttgcggtccactcttcctgaagctcgtagagttcatcgactttatcctgacaatcgacatagctgcgataatccgccagtacctggtagtgatcgccgaagttgatcaggctatcaaccagatcgcgatagcgacccggatcttccggactgaatacaccgctgccgatttgcgtcagcacctgatgcagctcctcatctttctcgtagtattcacgcggtttgtagccctgacgacgcagttcttccacttcttccgctgtgttaccaaaaataaagatattgtcagcaccgacatgatccagcatctcgacattcgcaccgtccaacgtaccgatagtcagcgcaccgttaagcgcaaacttcatgttactggtgccggaagcttccgtccctgccaggctaatctgttcagacagatctgccgccggaatgatcaactgcgccaggctaacgctgtagttcgggatgaacacgactttcagcttatcgccaatctgcggatcgttgttgatcactttcgctacgtcattgatcaaatgaataatgtgcttcgccatgtaataggcgctagccgccttaccgccaaaaatattcacgcgcggtacccacttcgcatccgggtcggccttgatgcggttatagcgggtaatcacatgcaacacattcatcaattgacgtttgtattcgtgaatacgtttgatttgtacatcgaacaacgcctttggattcaccaccacattcagctgctgggcgatatactctgccagacgctttttgttctccagcttcgcctgatgcacagcgtgattaaccattgggaaatcacagtgttgttgcagctcattaagcaggctaaggtcggtgcgccagttacggcccaggtgttcgtccagcacggcactaaggcttgggttcgctaccgccagccagcgacgcggcgtcacaccgttggtgacgttggtgaaacgacccgggaagattttcgcaaagtcggcaaacaagctttgcaccatcagattagagtgcagttcgcttacaccgttaactttgtggctcacaacaaccgccagccaggccatacgcacacgacgaccgttggattcatcaatgatgctcgcccgtcccagcagatcggtatcgttcggatactgttcctgcaaggttttcaggaaatagtcgttgatttcaaagatgatctgcaggtgacgcggcagaattttacccagcatatcaaccggccaggtttccagcgcctcgctcatcagcgtgtggttagtgtaggagaagacctgacaacacacctcaaacgcgtcgtcccagctaaattggtgctcatcgatcagcagacgcatcatctcaggaatgctcagtaccggatgggtatcattgagatgaatcgcgattttatccgccaggttatcgtaggttttatgcaactgataatggcggcttaaaatgtcctgaatggtgctggaaaccaggaagtattcctgacgcaggcgcagctcacgcccggagtaggtggagtcatccggatacagtacgcgagatacgttctcggagtggtttttatcttccactgccgcgaagtagtcaccctggttgaatttaccgaggttaatttcgctactggcttgcgcactccacaaacgcagcgtgttggtcgcgtcggtgtcgtaaccagggattatctgatcgtaagcgactcccagaatctcttcggtttcaatccagcgcgtttttttaccttcctgctgaatgcgaccgccaaaacggactttatagcgcgtgttgtggcgtttgaattcccacgggttaccgtattccagccagtagtctgggctctctttctggctaccgttaacgatgttctgcttgaacataccgtagtcatagcggatgccgtaaccgcgccccggcaaccctaacgtcgccagagaatcaaggaagcaagccgccagacgtcccaggccaccgttaccgaggcctgggtcattttcttcatcaatcagctcttcgagatttaaccccatcgcttccagtgcgccctgtacatcttcgtaaattcctaggctcaacatggcgttggagagcgtacggccaatcaaaaactccatgctcaggtagtaaacctgacgagtttcttggctcaactgggcacggttactacgtaaccagcgctccacgagacgatcgcgcacagcaaataacgttgcgttcagccattcatgtttattggcgacgaccgggtcctttccaatcgtaaacatcagcttgtaagcgatagagtgcttaagagcttctacgctaagcgtggggctactatatgtaaacggagcattcatataggcgtttcctgaaaattatttcaagcgatagtaaagctcacggtagctcttcgccgcgacctgccagctaaaatccattgccatagcctgacgttgcacaaaccgccacagactaggacgggaccacagtacaaaagcacgtcgaatagcccgtaacaggctccaggcattactatcttcaaagacaaacccactggcgacgccatctgcaaggttctcaagagaacagtcagaaaccgtatcagcaagcccaccggtgcgccgcactaacggcagcgtaccgtacttcaatccataaagttgcgttaagccgcacggttcaaaacggctgggcaccagaatgacgtccgcgccgcccataatgcgatggctaaatgcttcgtgatagccaatctgaacgcccacctgaccggggtattccgctgccgccgcaaggaaaccttcctgcagcaccggatcgcccgcgccgagtagcgccagctgcccgccctgctccagaagacccggtaaggcttccagcaccaggtcgagacctttctggctggtcagacggctcaccactgcaaaaagcggcactttatcgtcaaccttaagccccattgcgatttgtaactggcgcttattttccgctttatcttccaacgtatcgcgggtgtaacggctggccaacagtaagtccgtctctggactccagattttctcgtccacgccgttcagtacgccggaaagacgcccttcacggtgacgctgttgcaacagaccttccataccgtaggcaaactgcggttcggtgatctcgcgagcgtaggttggactgaccgccgtaatgtgatcggcatagtacagaccggccttcaggaaagagatttgtccgttgaattccagcccatgaatattaaagaaactccatggcaattggatgtcattcatgtgatgtgcataaaacatgccttgataggccaggttgtgcacagtaaacacgctcttcgccggacgcccgcgcgccgccagatacgcaggcgcaaggcctgcatgccagtcgtgcgcatgcaccacatcaggacgccagaatgggtcaagcccgctggccatttctgccccaacccaccccagcagcgcaaaacgcaatacgttgtcggtataggcaaataagttggtatcgtgatacgggcttcccggacgatcatagagatgcggcgcgtcaatcaggtaaatgccaaccccgttgtaatgaccgaacaacagcgtgatatgtccggcgaaggtatcacgacgggatactacctgcgcatcggtcacgccacggcgaatatcgggaaatgcaggcaacagtacgcgagcgtcaacgccgtctgcgatttgtgctgcgggtaatgccccaataacatcagccagaccgccggttttaagcagcgggaacatctcactacatacatgtaaaacctgcattatcgctcctgtttatgccctaacttccgtagcatttcgcgcgttaccagcacgatgccttcttcactacgatagaaacgacgtgcatcttcctctgcgttttcaccaatcaccatgccttccggaataacacaagcacgatcgatgacgcagcggcgcagacggcagctgcgacctacccatacttccggtaacaatacggcggaatcaatgttgcagaaactattcacgcgaacgcggctgaacagaacggactgcaccaccacgctaccggagatcacacaaccgccggaaaccagactgttaagggtcatcccgtggctaccggagcgatcctgcacgaatttcgctggcggtaaactttcattgtaggtgcgaattggccaattgcgatcgtacatatccagttccggcaccacagaggccagatcgaggttcgctttccagtaagcttccagcgtacccacatcgcgccagtacggctcggcatccgggtcggattgtacgcaagagagcgggaacgggtgcgcataggccagaccggcttcggtgatcttgggaatcaaatctttgccaaagtcgtggctggagttctcatcgcgatcgtcttcttccagcagttcatacagatagtcggcgtcaaagacgtagatacccatactcgccagagatttgctcggatcgttcggcatactcggcgggttagcaggtttttcaacgaattcgataattttatcgttctcatcaaccgccataacgccaaatgcggaggcttcttcaatcggtactggcatacaagcaacggtgcaacgtgcgcctttttcgacgtgatcgataagcatacggctgtagtcttgcttgtagatatggtcgcccgccaggatcaccacgtattccgctttataacggcggataatgtcgaggttttgggtgaccgcatctgcggtgccgcgataccagttttcccctttcattctctgctgtgctggcagcagatcgacaaactcgttcatttcttcattgaagaaactccagccgcgctgaatgtgctgcaccagagtgtgggactggtactgggtgatcacgcccatacgacggatcccggagttgatgcagttagacagcgcaaagtcgataatgcggaacttaccgccgaagtgtacggccggttttgctcgcttattggttaaatccttcaggcgggtaccacgtcctcccgccagtatcagggcaacagatttcaatggcagctggcgcgccaacattaagtgatcgttcttctctaaactaaccatgactaactccttttttatcatctctggaacacacacaatccgtgtgcaggtccctgccagacagccgtaatcactgggttatcctctccagcgaatgggggaatggcgtgccactccccagcaggtaaaacaatctctgttacctcaagcgtggcgttaattgcgatcaaaaagcgatcgctgagcagaatttgcagctgtttcggcccgttttgccactcatccgtgcttaaaggttgagcatatcgatttagccaacggacattgccgtcgccttcttcccaccagcgattctccaccaaagcgggaatgcgcttgcgcagatggattaacgcggcggtaaatgcggttaaaccactgcttgcctggctccagtccaaccaggttaattggttatcctgacagtaggcattgttattgccatgctggctgtgaccatgttcgtcaccggccagtaacatcggcgtaccctgggagagcaacaacgttgttaacagggcgtgaatgctgtcgcgccgccgttcaaccaggtcaagagaaccgcctaacccttctttaccatgattgttactgtaattgttgttggtcccgtcgcgattttcttctccgtttgcttcattgtgtttatggttgaagcaaacgcagtcgcgaagcgtaaaaccgtcatgcgcggtgacgagattaatcgcggcactcggcagacgaccattacgtttaaaaacatcgctggaggcagcaaaacgcccggcaaacgcccccagaggcaaatcataatgtagccagaaacgacgggcagcatcgcggaaatgatcgttccactcggcaaacagcggcgggaaatttcccacctgataaccaccaggagcgatatcccacggttcagcaattaacttcacctggctgagcaccgggcagttctggatagcggtaaacaacggcgcatcctgacggaactctggcgtacggcccatgactgccgccagatcaaagcggaaaccatcgacgtggcaggtttctacccaataacgcaggcaggcgctggcataatccaccaccgccggatgactcaaattgagcgtgttgccgcaaccggtccagttgtgataatcgccgtcttctcttatccaataatagctacggttatcgatcccacgcaggctgaataacgggccgtcgaggtccagttccgcactatggttgagcacgatatcaagaatgacttcgatacccgctttatgcagtgctttgattgcatcgcgaaactcatccagcgccgtttctgggctgcaggcatacgccggatgcagcgcaaacatcgccaccgggttgtaaccccagtagttacttagccccatgcgttgcagacgtggttcactggcaaactgcgccactggcagcagttccagcgcggtaatgcccaattgtttcaaatagttgatcatcaccggatgcccgagggctttataagtgccacggatctcgaccgggatctccgggtgcaagtacgttaatcctttgacatgggcttcataaatgatggtgctgccccacggcgtgcgcggcggggcatcatcttcccagtcatagtgatcaaccaccactacgcatttcggcgcaatggcggcgttgtcgcgatagtcaggttcattatgaccggcgtgcagcagcgggttatctttaaactccccgtcaatttgccgcgcgcaaggatcaatcaacaacttcgccgggttaaagcgatgcccctcggcgggttgccaggggccatgaacgcgataaccataacgcaaacccgggcgcgcatccggcagataaccgtgccaaatgtcgccactgtgccctggcaagtcatagcgatgttcctggccattggcgtcaaagacacacagttctacccgctcggcatgagcggagaaaagtgtgaagttgacgccctgaccgtcgtaatgcgcgccgaggggagcgggtttgccaatggcgagttgtgtcattctgcctcccgaaccagccagatagtggccagcggtggtagcgtcaggcttagactatgctgacgaccgtggctggcaatctcatcgctgtgtaccgtgccgccattgcctgcattactgccgtgatagtgcatggaatcggtattgaggatttcacgccatttgcccggctggtttatgccgaagcgataatcatgacgcggtaccggcgtaaagttactggcaacgatgatttcgttaccctctttatcgcgacgcacaaagatcagcacgctgcgttctttgtcatccaccaccagccattcaaagccgtacgggtcaaaatccagttcatgcattgctttatggtggcggtaggtgaggttcagatcgcgcaccagacgctggacaccgtggtgccagttatcgccgccttccaacagatgccagtcgaggctggcgtcatggttccactcgcggccctgggcaaattcgttacccatgaacagtagtttcttgcccgggaatgcccacatccagccatagtaggcgcgcaggttcgcgaatttctgccatgcgtcgcccggcatgcggtcgagaatgctttttttaccgtggaccacttcatcatggctcaacggcaggacgaagttttcagtgtagttgtagagaatcccgaaggtcagtttatcgtgatgatactgacgataaaccgggtcgagcttcatgtagtccagggtgtcatgcatccagccgaggttccacttgtaccagaagcccagaccgcccatatcctgcggacgagaaacgccagggaaatcggtagactcctcagccattgtcaccgcaccggaaacctgctcaccaagaatacggttggtattacgcaagaattcaatcgcttcaagattctcgcgcccgccaaattcgttcgggatccactccccctctttacggctgtagtcgcgataaatcatactcgccaccgcatcgacgcgcagcgcatcaataccaaaacgttcaatccagtaaagcgcgttaccgacgaggaagttactgacttcacggcgaccatagttgtagatcagcgtgttccagtcctgatgatagccttcacgcggatcgctgtgttcatacaagttcgtgccatcaaattcggcaagcgcaaagtcatcagtcgggaagtggcctggcacccagtcgagaatcacgttcagaccagctgcgtgtgcggcatcaatgaaataacggaagtcgtcgcgagtaccaaaacggcgggttggcgcatacaggccggttggctgataaccccaactgccatcgaagggatgctcgttaatgggcagtagttcgaggtgggtaaagcccatccatttagcataaggcaccagttgatcggccagctcgcggtagctcaaccagaaattgttgtcggtgtggcgacgccaggaacccaggtgaacttcataaatagagattggcgcatcaaactgattcgcttttttgcgctcttcagtctgtacaaccttttccggcagcccgcaaataagagacgcggtttccgggcgcatttgcgcttcaaaggcataagggtcggacttcagacgcaagttgccattggcatcaatcatctcgtatttatagagctgaccgttatgcgccccagggataaacagttcccagatgccgctctctttacgcaggcgcatcgggtgacggcgaccgtcccagtagttgaattgcccaaccacgctgacccgacgggcgtttggagcccagacagagaaacgcgtacctgtgacgccatccatagtatctgcatgcgcgcctaaggtttcatacgggcgcaggtgagtaccttcagataatagccaggcatccatttcctggattagcggaccaaaacggtaaggatcatcaatcaggttttgctgaccatgccagacaacagccaactgatagcggaaaaaattcttacgtcgcggaatgacgccgctaaagaatccccgactgtcgagacactccagttttgcgagtttgcgcccggttttcggttcaatcacccacacatcggtagcgtcgggtaaaagggcacggacttccagtcccgcggtggttttatgcattcccagtacggaaaaaggatccgcaaaatggcctgcaattagcgcgttaatcacgtctctatcgatacgatcggacatgcttgtcttcctgttttattgtgtcaccccatccaattggatttttgacttctggttgtgacatttttttgacctgaacggcgcagcactctgtgcatcctctctgcgtcgtcctcacttcaggtaaggctgtgaatactcatgtattcagccacccttaaagaatagccaatgctctatttaactcccggtaaatcatgaaacatctgcgcttactcctgtattacgcactaacaggggcggcatcgcgccccagatttaatgaataaagattacgccagttgacgaagcatccgacgcagcggctccgcggccccccacagcagctggtcgcccacggtaaaggcactcaggaactctggtcccatattcagcttacgcaggcggcctaccggcgtggtcagcgtgccggtaacggcagctggggttagctcacgcatagtgatttcccgatcgttcggaacgactttcgcccacggattgtgcgcagccagcagttcttccacggtcggaatagacacatcttttttcaatttaatagtgaatgcctggctgtggcagcgcaatgccccgacacgcacacataaaccatctaccggaattacggaagatgtgttgaggatcttgttggtttccgcctgccctttccactcttcgcggctctgaccgttatcgagctgtttgtcgatccacggaatcaggctacccgccagcggcacgccaaagttatccaccggcagctcaccgctacgggttaaggttgtgactttgcgttcgatatcgagaatagcagaggacggggtcgcgagttcatctgccacatggccatacagatggcccatctgggttaataactcacgcatatgtcgcgcaccaccgccggaagcggcctggtaggttgcaacggacacccaatcaacaagatcattggcgaataaaccacccaagctcatcaacatcaggcttacggtacagttaccgccaacaaaagtcctgatgccattatttaatccgtcggtaatgacgtcctgattgacggggtcaagaatgatgatggcgtcatctttcatgcgcagagagcttgctgcgtcaatccagtaaccttgccatccgctttcacgaagctttggatagatttcgttggtataatcgccgccctgacaggtcacaatgatatcgagggcctttagcgcctccagatcaaaggcatcctgaagtgtgccagtggttccgccaaaagacggcgcagcctggccaagctgagaagtagaaaagaagacagggcgaatggcgtcgaagtcgcgctcttcaaccatgcgttgcatgagaacggagccgaccataccgcgccagccgataaaaccaacatttttcataagcgtttttttcctgcaaagatgtgtgctgtataaatgtgccggtctcctcttggcacatctttcaccatacaaaaagcagccaaagtcgcaagtgaaattaatcaatgatagcgaagccatcagtaatgcgacttatcctgctttgttagcacgcagaaagtccgcggcaattatcagggaatttgagttatgaatgaaatcatttctgcagcagttttattgatcctgattatggatccgctcggaaacctacctattttcatgtccgtactgaaacatactgaaccgaaaagacggcgggcaatcatggtgcgagagttgcttattgctctcctggtgatgctggtgttcctgtttgcgggtgagaaaattctggcatttcttagcctacgagcagaaaccgtctccatttctggcggcatcattctgtttctgatcgccattaaaatgattttccccagcgctagtggaaatagcagcgggcttccggcaggtgaagagccatttatcgtgccgttggcaattccgttagtcgccgggccgactattctcgccacgctgatgttgttgtctcatcagtacccgaatcagatggggcatctggtgattgctctgctgctggcctggggcggcacctttgtcatcctgctacagtctagcctatttttacgtctgctgggcgagaaaggggtgaacgcacttgaacgcctgatgggattgattctggtgatgatggcaacccagatgttcctcgacggcattcgaatgtggatgaaggggtaacgaggagagtttttcgaaaagaacccggtagcgtcacaactaccgggcgaacaaacttaactcaacagctggaacgcaatcatcccaacgatggcaccgacagtgccgaggatggtttccatcatggtccaggttttcagcgtttcggcttcggtcgcgccggtaaatttaccgaacaaccagaaaccggcgtcgttaacgtggctgacaacaatgctaccaccagcgatacaaatgctcagcgccgccatttgcgcaccggagtagttcagttgttcaataaccggcatcaccagtcctaccgccgttaaacaggctacggtggcagaaccctgaatgatgcgcactgcagctgccagcacgaagcaggtgatagcaatcggcaggcccatgccggttaacgcttcgcccagtgccggacctacgccagagtcaaccagcacctgtttgaacacgccgcccgcaccaatcaccagcagaatgatccccgccggttgcagcgcgtgaccgcaaatctccatcactttgtcttttggcatgccctgacgcattgccagaccgtaaatcgccaccagacaagcaaccagaatcgcggtaaacggatgaccgataaactcaaaccattcgtaagcagtacttccttccggcacaaaacgcgcggcaatggttttcagccctaccagcaccagcggcagcaggatcaggctcaggctgaatccgaaagatggcattttgccttcgccgagatgcggttcgctgatgtcgtcaggaatatgcagctcaacgtaacggctgatgaagttaccccacagcggcccggcaataatcattcccggaattgccgcacacaggccaatcaggatcatccagccaaagtcggcattcatctggcttgccagcagcatcggcgctggtccaggcaccagaaatgccgccgctgccgccacgcctgcaaataatgggattaccagcttcaccaggttcgtaccggtgtggcgcgccatactgaaagcaacgctaatcagcagaactatcgccacttcaaagaacagcggtagcgcacagaccagccccgcaaggccgatggcataatgcgcgcggctgtgaccgaaggatttgagcattttgacggcaatctgatcgactgcgccggtttcatgtaagatcttgccaaacatagctcccagggcgacaaccaccgccaggaagccgagggtgcctcccatccctttttccatcgtcgctgcgattttatcgagcggcataccagaaaaaaggccagcccccatggacaccaccattaaagccaggaaagcgtgcatacgcgccttcatgactaaaaacagcagcagtaaaacagaccctactgctgttaaaacaagcgttaatgtagtcactacttatttgccttttttaataacctcaatggtgcttgccacaacaccttccagcggttgatcgatatccaccaccagtacatcggtttcgtccgcacccggctcctgcagcgtttcaaactgcgtcaccaacatttgggttttaaagaaatggcctttgcgcgctttcaggcggatttcaatcacatcaaaatcgcctttcaaatagatgaaagagagattcggattaccttcacgcagcaagtcgcgatagtgttttttcaatgcagaacagacgatcaggctcactttattagtgcgctgcatagcaaacgcggcgtcgttcagcgcctgcaaccacggtttgcgatcgtcgtcattcagtggttcgccagacgccattttttcgatattgcgccgtggatggaggaaatcgccatcaagaaacgcggcatgaagttgatgcgccacttcactggcgaccgcagatttgccgctgccgcttacgcccatcaagacgtaaatgtggtgatcatggttagtcgtgctcaaagtggtgcccccacaatacaagaattaaaaatgttacgggtaactgttatcggtaacattgtccagccggacaatatcagaagcaatatccatccatgccttaagtgtataagtgtgagctacttcaaatttgtgggcttaaatagatccgcccggactcaaggtgaaacctaaatctaacattttcggtgtcacagattcgccacgaatacgcgccagcaggcgttcagcgccaatactgcccatccgctcacgcggcgtcagcacgctcgcaagtcgtggctccatcacctgaccaatgtcatgaccgtggaaaccggcaatcgccatatcgtcaggaacttttaaccccagacgctgacattcaaacgccgcgccgaccgccaggtcatcattcgtacagaacacgccatccagctgcggatattcccgccgcgcctggcgaatcagttcaataccggaagagtaagaagaagattgctcaaccatcacgctatatggcaccaggcctgcatccagcatcgcctgttcgtatcccttctgtttgatgatagtacgttcgtcgagacgtgcgccgagataggcaatgtggcgatgcccgcgagcaataatggcagtggtcatctggcgtgctgcttcaaagttatcaaaaccgacggcgatatcaaggcatgggctcttgctgtccatcagttccaccacgggaatacccgccacttcaatcatctttaaggtgcgcggcgtgtgggtacgttcggtgaggatcaggccgtcgatattccaggagagcatggattcgaggcgttcttgctccatttccggtttataaccgtagtgcgccagcatggtctgataaccgtgcgcgtcggtgacgctttcgattccgcgtaatacttccgcgaaaacctggttggtgagagaaggtaacaggacgccaatcgcccggctggtggcgttagagaggatatcgggcgcacgattgggaatatagcccagttcatcaagagccgcggcaatcttgccgcgtagagcgacggaaacctgctccgggttgcgtaaaaaacggctgaccgtcattttggtcacgcctacacggtcagccacatcctgaagtacgggtcttttctttttcatcgtcctgaaggtacaaaagagatagattctcttagtttaacacggacacatcagaaccttcccggggaaaacagtgcttgtttacaattattagatatacactaaatcaattgcatcgcattgtgctaacgacgcggcaaaaccccggaagcgtacatcagcacgcgaccggagcgagcgaggaagcctgcaaaaaggcaggcttcaaagatgccgttgagttttaaaccggcggcagatcgaacagtaacacttcgctgtcgctatccgcatggatggagattgcctgctcatcccagattgccagaccatcgctggtgctggctttcacgccgttaatggtgacattgcctttcaccacctggatccagacgcggcgttcagcggcaatctgatgcacgctctgctcatctttcagcaacgcccagcggtacagttccatatcctgatgcactttcaaactaccatctcgcgcatccgggctgagcaccagctgtttgccctgtacggcatcgaagcgacgctgttcataacgcggcgtaataccgttttcttcaggcatgatccagatctgatacagatgcagacgctcggtgctgcttgggttgtactcactgtgacgaatacccgtaccagcactcataatctggaactcacccgccggaacctgctctttattgcccatgctgtcctgatgctcaacagtaccttccagcacgtaggtcaaaatttccatatctttatgcgggtgagtgccgaagccctgccctgcttcaatcacgtcgtcgttaatcacgcgcagcgcggagaagcccataaagttcggatcgtaatagttggcaaaagagaaagtatgccaggagtccagccagccatgatttgcatgaccacgttcatttgctttgcgtaagtagatcatttgtattcgccccctgaatgatttcgatgggcttagtgtggacccgatctgcctgggatgatagagggtgaaaattgacccctctgttcaaaaaaattgaactattcgaggggccatcaaacttacttagcgagagttactgtggagggagaggcttgctcaaatccgcgttcaaggatttccagattggtaagaacttcagattccttgacgtaatttggcgcaccgtgggtgatggtttgatacaacgcatcataaacgcgcccgtaatcgcccatctccggcttcatctcttctctgaccgtcacgccctcgtcattgacatactccagcacaccgacgctatcatccgctgcgaatcccggttcgcccggcataatattagccttcaggctggtttcctgctggtcgataccgtatttaataaagctacctttcttaccgtgaacgataaatttcggataatcgattttcaccagatggctggttttgacgatggctttcaggtcgccataaaacagttgcgcttcaaaggtgtcgtcaggattggctttattacgcaggctgcggatgtcataagcgacgtgatccgggcgaccgaacagagaaataatctggtccatcgtatgcacaccaaggccataaaacgcgccatcctgcggcagcccaggtttggtttctgccaccgggcggtaatagtcaaaatggctttccacttcaacaatctctcccaacttgccactttcaatcgcttttttcgctgtcaggaagcaggagtcaaagcgacgattctgatacggcgtgacggtcagccctttgcttttcgccaacgcaaacagctctttcgcctgcgcaagtgtcggagtgaacggtttttcgaccagcacatttttcccggcttccagcgcgcgtttcgcgtactcgaaatggctgtccgcgtgggtgcagacaacaaccagcttaacatcgggatcgtttagtacttcgtcgagatcgctggtgaaatggatatgggaataaatgggagcctgttcttccggcttcgcatggcgacgaaaaatatgcgcgacatgccagctatccttgcggttaagtacatacggcagatggtaacgggtggtgcttttgccgaagccaataaaggcgcagttgatgaccatgatttcgtcctttttaaggtggttatttacaccttagcgcaaagcggacgtggttcctactggagtgcgcataacgaacacaagcactcccgtggataaattgagaacgaaagatcaaaaaaaaagccagcacccggctggctaagtaatactggaagcaatgtgagcaatgtcgtgctttcaggttctccgcgagggtcttcctgatcgcgagacaataataatcattctcattcgcacttgtccaacactttttgcaaaaaaatgcatttgactcgcatttgaaagtcaatgatgttgaaagggacatttaccccaaagaggacaaaggaacaaatgctcttcccacgaagagggccgctaaccttagtaccccgccgttaaatcatccacgctgcgcgggtcggatgcgccgtacaactcaccgtccggcccaaccataatgctttgtgtactgcccatcgcctctttcagcgccactttctgaccttttgcttccagcagcttgagcgtatccgggctaaaccctttttcgacacgcagctcgtccggcaaccactgatggtggaaacgcggcgcattggtcgcttcggcgacgttcaagccataatcgatgctattcaccaccatttgcagcactgtagtgatgatccggctaccgcctgggctaccggtaaccagccaggttttaccgtctttcaccacaatggtcgggctcatgctgctcagcgggcgtttgttcggcccgacggcgttggcatcaccgcccaccagcccgtaaacgttcggtacgcccggtttggcggagaaatcatccatctggttattaagcagaataccgctctcgcccgcgacaatgcccgtaccgaaggtggtgttcagcgtataggtcaccgccaccgcgttaccatctttatccaccacactgtaatgggtagtttgattactctcataaggcgcaagcttgccggggcgaatttcgctggatggcttcgctttattgatatcaatttgatcggcaatagatttggcataggctttattggtcagcgcctgccacggtactttgacaaaatccgggtcgccaagatattcgctgcggtcggcgtaggcgtatttctccgcttctgccatgatttgcatcgcatcggcgctgccaaagccgtatttcttcatatcgaagttttccagaatattgaggatttgtacgatatggatcccgccggaggatggcggtggcatggagtaaacctgatacccgcgataatcgccgcttatcggagtgcgttcgaccgctttataggctgctaaatcttctttagtgatcaagccaccgtttttctgcatctcctgggcgatctgttccgcaatcgtgcctttatagaattcgtccgggccgttttcagcaatcatctccaggctctttgccaggttcgcctgcaccagcgtgtcgccctttttcagcggctcgccctctttccagaagatagctttactgttttcgtgattcggcaacacttcgctaccgtaggttttgagatcgtcagccagcgcgtcgttaacgataaaaccatcgcgtgccagtttaaacgcgggctgcacgactttgttcagcggcatggtgccgtatttatccagcgccaggctgaaacctgctaccgtacccggtgtgccggaagccagatggctagtgagactttttttgctgtccgggttgccctgatcatcgaggaacatatcgcgggtcgctttggcgggtgccatttcgcggaaatcgatagccgtggtattgccatttttgctgcggattaacataaaaccaccaccgcccagattccctgcctgcggatgcgttaccgccagcgcgtagcccaccgccacggcggcatcaacggcattcccgccctccttgagaatatccacccccacctgagtggcagtggcgtccacagacgctaccattccctgtttcgcgcgtaccgggtggaagacatcttcctccacaccatagctgacgggcggcgcaggaggcgcggcggcggcgctaaaacaacttccactgagcagagcagcaatggccacccggcgtaaaaacgtcggttttatcatcgttattctccagagattaaggggcaaccccagctaagcctggtatataactctgaattaatcatcgttttgtcgggaagcgagtaaacttaaaggatatcttcagaggaggatacgcgatgaaacgacttctgattcttacggcactcctgccgtttgtcggctttgcacagcccattaatactctgaacaaccctaaccagccggggtatcagatacccagccagcagcggatgcaaacccagatgcagactcagcaaatccagcaaaaagggatgctgaatcagcaactgaaaacgcaaactcagttgcaacagcagcatttagaaaaccagataaacaataattctcagcgggtgttgcagagtcagccgggggagcgaaatcccgcccggcagcaaatgctgcccaacaccaacggcgggatgttaaacagcaaccgtaatccggatagtagcttgaatcagcagcatatgctgccggagaggagaaacggcgacatgctgaatcagcccagcacgccgcagcctgacattccgttgaaaactattgggccgtaattattgggccgtaaagttcggaccaatcacgtcaatcgcatcggtacagatgcaatccacaccccagcgcagcaactctgctgcgcgctggggtttattgacggtataaaccagaatccgcagtccggcgtctttcaactgcatcactcgcgctttattgagtaacttatgattgagatgaatagagacgcagcccagccgcgcggtcagttcgcgccagtcgtcgcgccactcatccagcaacaaaccgcgcggcagttccggtgccgcctgttgtgcagcttctaaagcatcaatctcaaagctactcagcagcggcggcgtcataccggcccacagctcgcgtgccgccagcgccaccattttgcccgttaatggcccggtgccggtggtgggtttgatttcgatattcgccatcatcccgtgttcgcggcaacgttccgccacctggctaagcaacggtagcggctcacctttaaacattttgctgtaccaactgcccgcatccacgcgcagtaaatcctgccagttcagttcacccgcgacgccccagccgttgctggtacgttcgagattgtcgtcatggagcaggaagatctcgccatctttgcttaacttcgcgtcaaattcgatcatcttatgaccgtattttgccccgacgtcgatactcgccagggtgttttccggggccagcttaccgccgccacgatgagcgacgatgcggggataaggccagttactcatactcgttgtcctgtttcaccatcaaaaagatgcagctgattttccgccagatgcagccacagcgtgctgcctgccgtcgggcgctcctgatgcgccagtcgcaccaccagcttctgctcgccccagcgtccgtgcgccaggttatctgcgccgaggatctccagcgtgtccatcaccatcggtacgccgccttctgcctggctgcttagcgcaatatgttccgggcgaatgccgagagtcattttacgcccggcatactgacggtagccaccgtttagcggcagctcaataccgccgtccagttcgaaatgcgtgccttcgttattcacgcggcctgtcagcaggttcatcgccggactgccgataaaactcgctacaaacaggctggcgggcttttcgtagacttcaactggtgtgccaatctgttcggcaacaccgccgttcatcaccattactcgctgggcgagcgtcatcgcttcaacctgatcgtgagtaacgtagagactagtcgttttcaggcgacggtgcaactgttgcagttcaagacgcatctgcacgcgcagcttggcatcgaggttagagagcggctcatcaaacaggaacaccgccggatcgcgcacaatcgcgcggcccatcgccacacgctggcgctgaccgccggaaagctcgcgcgggcgacgtttgagcagaccgtccagctccagaatgcgcgccgcttctttaacgcgctcggcaatttgctgcttgcccatgccgcgaattttcagcccccacgccatgttttcttcgacactcatatgcggataaagcgcgtagttctggaacaccatcgcaatcccgcgatcttttggctccatttcagtcacgcgctggtcgttgatccagatatcgccttctgtcacccgctccagcccggcaaccatgcgcagcagcgtgcttttcccgcagccagacggcccgaccatcacgataaattcgccatccgccacatcaagggtcagcggtttaatgacctgggttttaccatcccagcttttggttactgcctgtaatttcagtcctgccatcttatttctcactatcgaccaggccgcgcacgaaggcacgctgcatcactaaaacaatcaccaccggagggataagcgttaacaacatcgccaccatcacactgttccattccgtggtgccttcgcctgtagcgatcatccctttgatccctgccacggtggtgccgagatccacatcggtaataatcaacaacggccacaaatactgattccagccgtagataaaggtgatcacaaacagcgccgccagattagttttggagagcggaaaaacgatgtcgcaaaagaagcgcattgggcttgcgccgtcgatccgcgcggcttccaccagctcatccggcagcgtcataaagaactggcggaacaggaaagtagcggtcgcgctggccatcagcggcagcgttaaaccggcgtagctgtcgagcatctgcaggttggcgatgacttccaccgtcgggaagatacgtacttcaaccggcagcatcagggtgataaaaatcatccagaagaagaggttacgtagcggaaaacgaaaccagacaatggcaaatgcgctgagcatgctgacggtaattttgccgagcgtaatgctgaacgccatcacaaagctgttaagcaacatccgccagaacggcgcgctattcgtgcctaccccgttcacccagatgttgtggatgttttccagcagatgtgtgccggggatgagcgtcatcggcgcggcatagacggcctgtttatccagcgtcgccgcgacaaacgccacgtacagcgggaagaggatcaccgcgatcccgaggatcagcatggtatggctgaatatcgtcagccacggacggttctcaatcattggtaacgcaccttgctttcaacatagcggaactgcaccaccgtcagcacgatgacgaggaacatcaacaccacgctctgtgcggcagagctagccagatccagtccggtaaaaccttcgcggtagatcttataaatcagcgtcgtggtggcctgaaccggcccgccggacgtggcggcgtcgatcaccgggaaggtgtcgaagaaggcatacaccaggttcactaccagcaggaagaaactcaccggggcgataagcggcagcgcaatcttaaagaagcggcgaatcggccctgcaccgtcgatggctgcggcttcgatcaagctacggggaatggattgcagcgcggcatagaagaacaggaagttgtagctgatttgcttccatacactggcaaacaccaccagaaacattgcctgaccgctgttttgcgcgtggttccagtcgtagccgaactccgcgagaaaatgggtgatcagcccgcgaccggggttaaacaggaagatccacaatacggcggcaacggcgggagccacggcgtaaggcagcaacattaaggtttgatagaaacggctgccgcgcacgatgtactccaccagcgccgcaaagaacaggcttaccagcaaaccgctgacggtgacaaaggtgctgaattttatcgtcgtccagaaggagtcgagatagtagctgtcatggaacagcgtgacgaagttatccaggccgacaaactggctggagaaaccaaacggatcgacgctttgtaggctgtaccacaacgcttcgcccgcaggccagataaaaaagataacggtgatgatgagctgcggcgcgaccagcagataaggcagccagcggctgcggaacaccggacgggaactactcattacggttaattcctgaactgtgccggatgcgcttcgcttatccggcctacacgcgatgccaggtcagataagcgaaacgcatccgacattacactgattaagacttcgtgcttttctcaaagcggcgcagcaactgatttccacgctcaacggcggtatccagtgcctgctgtggtgtcttcttaccggtccacacgctctccagctcttcatccacaatcacgcggatctgcggcatgttgcccagacgcagccctttggtgaacggcaacggcggcttattcagcatctgacgcgtcgcggtatccgcccctgggtttttctcataaaagccctgctcacgggtcaggtcatacgctgctttggtgattggcagataaccggttttctgatgccactcggcagcgttttctggcttcgcgaggaaatcgaggaacttcgccacaccggtatacgtttctttatctttaccctgcatcacccacaggctggctccgccgataatggcgttttgtggcgcatctttcgcatcggcgtcgtaaggcatcatgcctacgccgtagttaaatttggcgtactcgcgaatgttggcaagagaaccggaagaggcggtggtcatcgcgcaatcaccgttatagaacttctcggtggattcatccttacgaccgacgtagctgaagtcgcccttcttgttcatctcctcgagcatggcgatgtgtttcacctgctccggcttattgaactccagcaccgcgtccgtgccgtcaaagccgttgtttttgctggcaaacggcagaccgttccaggcgctaaagttttccagttggatccagccctgccagccgctggcgtagccgcacttcatgccggaggctttcagtttcgcggcatagtccgccagatcctgccaggttttcggcggctgttccgggtctaatcctgctttcttgaaggcgtctttgttgtaatagagaacgggggtgctgctgttgaatggctgggagagtaagtggcccgttttgctgtcggagtagtaaccactaaccgtcggcacaaactggctctcatcgaactgaatccctgcctctttaaacacgtcatacaccggtttaatggctttgctcgccatcatggtggcggtgccaacttcataaacctgcaaaatagccggcgcgttgccggtacgaaatgcggcaatccccgcgcttaaattctgttcgtagttgcctttataggtcggtacaattttgtaatccgggttttcggcgttaaaacgttgggccagagaatccacctctttacccagttccccttccatagaatgccagaacggaatggtcgtcactgcctgtgcattccccattaacgccagtccgagcgccagtgcactagctgtataatgtaacggtttcatcgtttatctctcttgttgtaccgaatgcgcgaattcacgcgttttatgctcgcggggtaacatgacatgctcgaattacagaaaaataacttttttgttacatttgtaagatagtaaggtgtcagaaagatgacaaggcggtgacggcgtgggtgagggaaaatgggagatggggcacggataagcgggaaaatatagaaggtctgaatcaaactctacagattgctcatcgtttcatgccggatgcggcgtaaacgccttatcaggcctacaagatcgtgcaaattcaacatattgccactcacccagtaggcctgataagcgcagcgcatcaggcaattttacatttgtcacctgtctcaaaggagtcttttgactccctatcaatcaacgtgttattacccgcctaaatacgcacttctcaccgcttcattcgccagcagcgcatcaccagtatcggaaagcactacatggccgttttccagcacgtagccgcgatccgccagctttagcgcctggttggcgttctgctcgacgagaaagatagtcatcccctgctcgcgcagctgctcgatggtgtcgaaaatttgctggatgataatcggcgcaagaccgaggcttggctcatcaagcagtagcaaacgcgggttgctcatcagcgcacgaccaatcgccagcatctgctgttcaccgccggacatggtgcccgcccgctgaatacggcgctcatgcagacgtggaaacagctcatacacccactttatgcgctcctggaactggtcgcgttcagcaaaaaaaccgcccatcgccaggttctcttccaccgtcatccggctgaagacgcgacgcccttccgggacaatcgccaccgcttcgcgcatgattttcgctgtctgccagtcggtaatgtctttatcatcaaacacaattcgcccgctggtggcacgcggatcgccgcataacgtgccgagcaaggtggttttccccgccccgttcgcgccaatcagcgtgacaatctcgccctgattgatatgcaggctcacctcatgcagcgcctggattttgccgtagtgggcgctgactttgtcaaaggacaacatgactttttccatcttatgcctcacctaaataggcacggatcacgtccgggttattacggatctgctccggcgtaccgtttgccagcggcgtcccctgattgaccacgtaaattcggtcgctaattcccatcaccagcttcatatcgtgttcaatcaacaagatagtggtgttgtgatgattgcgcagttcggcaatcagctcatccagctctttcgtctctttcgggttaagacctgccgcaggttcgtcgagcattaaaatctccggctgcgtcaccatgcagcgggcaatctcaagacggcgctggtcaccataggccaggttactcgcctgacggttggcgtgttccagcaaaccaatgcgctcaagccaggtcgcggcgcggtcgagcgcttcgctctgggcgcgacggaaggatggcgttttcaacaggccagagaacagcccggttttcagttgctgatgctgcgccaccagcaggttttcaattaccgtcatttcacggaacagacgcacatgctggaaggtgcgcaccacgcccatgcgggcaatttgctgccccggtaaaccttccaggtgctgatcgcgcagtaaaatggtgccgccggtgggtttgtagaatccggtcagacagttaaaaaccgtggtttttccggcaccgttagggccgattaagctgacgatctcctgcgggtacagttcaagattgacgttgttcaccgccagcaggccgccgaagcgcatcatcaggccgttaacagataataatggctgactcatgcctgctctcctttcgctgcgccgtttttcagcttcagttgcgggcgcgtcatgggcagcaagccctgcggacgccagatcatcatcagcaccatcaaaccaccgagcattaacatgctgtattcgttgaaatcacgcatcaactcgcggctcaccaccagcaaaattgccgccagaatcaccgcaaattggctgcccataccgccgagcaccactatcgccagcacaaacgcgctttcggcaaaggtgaaggattccgggctgacaaagccctgacgcgccgcaaacagcgttccggcaaaaccggcaaacgcggcacttatggtaaaggcagtcagcttgatacgacgcgggcttaagcccaggctacggcaggcgatttcatcttcacgcaacgcttcccacgcacgccccagcggcatccgcagcaggcggttaatgacaaacaggcttagcaccaccagcagcaacgccaccaggtagaggaagatgacacgatcggagggatcgtatttcaggccaaagaaattactgaacgtgtcccagccgccttcacgagcggtacggctgaactcgagtccgaagagtgtcggtttcgggatctgactgattccgttcgggccgccggtaatttcggtgttattgagcagcaatatgcgcacaatttcgccgaaaccgagggtaacgatcgccagatagtcaccgcgcaaacgcagcaccggaaaaccgagcaggaagcccgccgccgctgccattaatccagcaatcggcaggcaggtccagaagcccaagccgtaatagtgattgagcagcgcaaaagtgtaagcgccgatggcgtaaaaaccgccgtaccccagcaccagcagaccagaaagaccaacaaccacgttcagcccgagaccgaggataatgtagatcatggtcagggtggcaatatccaccgtcccgcgactaaccataaacggccacgccaccgcaagcaccaacagcgccacgaggaacagtttctgcttcaccgtggagccatcaatggcgggcagaataaacttcggtccggaaacgcttttcaaccctttctggaaagccggtcgcaaaagctggaagaaaaagaccaccgccgtgccgataaacacccactgccaacggacatcgctagccgtgtcgaccaccagtttggtgccatccagctccagttgcacgcccataaagacgcccgccagcacaaagaacatcgcggcagagagcagcgccattgcaatatgcatcggtttcatactttctctacctccgggcgacccagaataccggtcggcatcaccagcagcaccagaatcagcagggcgaaactgaccacatctttatattccgtactcagataggcagaagagagcgcctccgcaatccccagaatcaggccgccaatcatcgctcccggaatgctgccaatcccaccgagcaccgccgcggtaaaggctttcatcccggccataaagccgatgtaggggttaatgacgccgtagaactgaccgagcagcacacccgccaccgccgccatcgccgcgccaatcacaaaggtcagcgcaatcacccggtcggtgttaatgccaagcagactcgccattttcagatcttccgcgcaggcacgacacgcgcgacccatgcgggaatagcgaatgaaaatcgtcagcgccagcatggcgaggaaggtaacaatccagatcaccgcctgcatggtggtaatagaggcagagaagttttcgctatgccccaccacccactgaccgttaaacaggctcggcagcgccacgtcgcggctaccttcggtcaggctgacgtagttttgcaggaagatggacataccgattgcagagatgagtgcaatcaggcgcttagagttacgcaccgggcggtaagccacccgttcgatactccagccgtaggcgctggcaatgacgattgcgccgacgaatcccgcagctaccagcagccagccggtatcaatgcccatcatcatcagcgcggcgatgatcataaaactgacgtagctgccaatcatataaacctcgccgtgggcgaagttgatcatgccgataatgccgtaaaccatggtgtagccgatggctatcagcgcgtaggtactgcccagcgtgacgccgttaaacatctgctgcaagaaatacaaaaactgctcagacataaggtaacctttctaaacccgcccgcattttacgggcggtgggatgatcacttggctgccgtggaactaccgtcggcgtgccactggaagacaccaaaatcaaatcccttaagatcgcctttttcatcccagttcagcggcccaatcacggtgtttgcaccgttagcttttaaatctttcaccagcgccagcggctcatcgctgccggtacgctcaagggcagtcgccagagattgcaccgccgcgtaggtgatccagacataaggcccggacggatctttcttgtctgctttcagcgcatcaacgatgccctggtttgccggatcctggtcatagcgttttggcatagtgaccaacatgccttcggcggcatcaccggcaatgttgctcaagctcgcattacccacaccttccggccccataaactgggttttcaggccaacggaacgggcctggcgcagcatctgccccatttccgggtagtaaccgccgtagtaaacgaagtcgatgttttcttttttcaggcgggcgatcagcgcggagaaatctttctccccggcggtaataccgtcgaagaagacgacgttggcgttagccgctttcagcccgtcctgcacgctacgcgccagcccttcgccatactgttgtttgtcgtgaatgatggcgatgcgctggggcttcaccgtctcaagaatgtattttgccgccgttggcccctgggaagagtccagcccggcagtacgcataatgtgttgataaccgcgttgggtcagctccgggttggtcgctcccgggctgatcatcagaataccttcgtcttcatagatatcactcgcaggctgggtagaagaagaacacagatgaccaataacgtatttaatgccgtcattaacgattttgttggcgaccgcaacggcttgtttcgggtcgcatgcgtcgtcatattccacgccaaccagtttatcgcccttaattccccctttggcattaatgtctttaattgcctgacgcgcgccgttaaattccatatcgccccactgggcaatcgggccggacatcgcgccgacaacggcgactttaatatcgtcagccatagcggtgtgactaattgccagtgcaatcatccctgcgatgatagttttcgcattccgtttcatagtcaaaaatccccattcgtgatgttgtgttgctttgtttttatgtgttaacaaatcagactgttctttttttatactgcactgtttttgcctgtctgattaaggggttagcgcagtattttgtgataatagcgattaaaatccctatttttcagtcgattaagaacagataatattctgaatttattgatagataaacagaaaaaagtgcctttgtcagcataaaataacggcacaaagggcggaataattcactatcattcaggggattatgctggacatttttcattctctaatgttttaattttgtaattattgctgttaaaaaattaatcacctgccaaaagaaataaaaaagagaaagcctccgattaaattatttcgctacactggttccacttttgtgatttacacgggttacccatgaagctgaccatcattcgattagaaaaatttagcgaccaagaccggattgacctgcaaaagatctggccggagtattccccttccagcttacaggttgacgataaccaccgtatctacgccgcgcgttttaacgagcgcctgctcgctgccgtgcgggtaaccttaagcggcaccgagggagcactggattccctgcgcgtgcgggaagtcacccgccgtcgcggtgtggggcaatatctgctggaagaggttttgcgtaacaatcctggcgttagttgctggtggatggcggatgcaggcgtggaagatcgcggtgtgatgacggcgtttatgcaggcgctggggtttacggcacaacagggcggctgggagaagtgttaatcgtcaagtttgatttcaaaagtgatattgcctgatgcgctacgcttatcaggcctacaatgtgtgttgcaatttactgatttctttggatcttgtaggccggataaggcgtttacgccgcatccggcatgaagcaacgtactcgatattagcaatttggcggcaacccaaagttgccgattaatgattacttcgcatcggtcgccgtgccgttggcgtgccagtcaaatacgccgaactcaaagcctttcagatcgcctttctcatcccaggtcagcggtcccattacggtatccacggagttcgctttcaggtatttggcgatttcagccggatcgtcagactgattcaggcccgcctgcaaagattgcagcgcggcgtaggtggtccaaacgaatgcgccacttgggtcctgttttttcgctttgatcgcgtcaacaatgggtttgttcgccggaacctgatcgtagttcttcggcttggtcaccagcagcccttccgcactttcgcccgcaatgttagacaggctaacgttagccacaccttccggccccataaactgagttttcagccctgccgcgcgtgcctgacgcaggatttgccccatttccgggtgataaccgccgtagtaaacgaagtcgatattctcttttttcagacgcgccaccagcgtactgaaatctttttccccggcggtgatgccatcaaagaacaccacgtttgcattgcctttcttcaggccgtcctgcaccgctcgcgccagaccttcgccgtattgctgtttgtcgtgaacgatagcaatacgctgcggtttcactttctcaagaatatatttcgccgccgtcggcccctggtcggagtccaggccggtggtgcgcaggatcagctgatagccacgggcggtcagctccggcgcggttgccgctggggtgatcattaaaatgccttcgtcttcgtagatgtcagacgcaggctgcgtactactagaacagaggtgaccaatcacatatttaatgccgtcgttaacgactttgttcgccaccgcaaccgcctgtttcgggtcacaggcatcgtcatattttacgatttgcagtttgttgcctttaatgccgcctttagcgttgatatccgcaaccgcctgctctgcgccggtaaactcctggtcaccgtactgcgcaaccggaccggacattgcgcccacgaccgcgactttaatatcttctgccagagccatattgctgaatgccagcgcgatacatcctgccagtaacgctttaccctttatgttcatcctgagaatccccattcttctggttattacgtgtgttgtgatgttgtttttcagcactttatttcgttttatgcatgactacccgtgctttagcagcatactctgctaaaacatacccgatttttatgatattggaatagctattttgacagtttattaacaatctgcgtggggattggcgttttgccggaggggaaattgattattacagaggcccaaaaaacaaaaaccccggactctcatccagggttctctgcttaatagcggaaattacgcttcaatggcagcacgcaattttttcatcgcgttcttttccagctggcgtacacgctcagcggaaacgccgtaacggtcagccagttcctgcaacgtggacttgttgtcttcgtccagccagcgcgcacggatgatgtcctggctgcgttcgtccagaccctgcatcgcgtcggtcagacggtttgccgcctgctcttcccagttatcatcttcaatgccgtcggcaaagttagaacttttatcctgcagatagagcaccggagccatcggctggctgtcggaatcgtcgtcggaagacaggtcaaaggtcatgtcctgtgccgccatacgactttccatctcacgtacgtctttgctggttacgcccagttcacgggccaccatttcgacttcatcctggttaaaccagcccagacgctgcttggttttacgcaggttgaagaacagtttgcgctgcgctttggtggtcgcaactttgacgatacgccagttacgcagaacgtattcgtggatctctgctttgatccagtgaacggcgaaggagaccaggcgcacacccacttccgggttgaaacggcgcactgctttcatcaggccgatgttaccttcctgaatcaaatccgcctgtggcaggccatagcccgcataattacgagcaatatgaacaacaaaccgcaggtgagacaggatcagcgttttagctgcttccagatcgccatggtaatgcagcttttcagccagcgcccgctcctcgtcagcgctcaacatcggccacgcgttagctgcccggatgtaggaatccaggttgccaactggggctaaagctaaactttgcattttgtcagtcattcaaatcctctcaatcgatatcttctggcgcttcagtggtagcaacaactgtgccagagcttaagagcaacgaggttatcattcactgttttatcagaccgtgattttatccacaagttcaatgcaagcttgtgaataaattacgcacaaaatgtgacatagagatgaaataccgggaagagacaacggggtctctttccctgctacggaacccattgcagggaaagagtataacacgcttttattattcaggcgtaaagtggcgtaaatgttgtaccgtggcaagccacgctgccacccagccaatcatgctgcataccagcagcaatagcaggcattcatcgaaacttaagccattgatatcaaacttcgttccgaaaacctgtgccacttccgcaaccgcgctactcaatcgcagcaccagaatttcactcaaaattaaactcaacaatgcgccagaaaatcccagcagtgcgccaccatacaggaacgggcgcaggatgaatccatctgtcgcaccaatcagtttctgtacgttaatggagtcacggcgagcaaagatactcagacgcacactgttaccgatgacgaggaacacggccgccaccatcaacacgccgatcatcgcgctaacgcgcccgaccagcccggtcaacgccgccagacgggcaaaccagctgtcatccatccgcacttcgtcaatgccgttaatctgcgtgatacgatcacgcagcgtattcagactttccgtcccctggaaatcgagtttcgggatcaccaccgccactgccggaagcgggttttcttccagcatatccagcgcaccaccaaaaccagaccagttacggaactcacccagtgcgtcttcacgagaaagatagttcactttctccacgccttgctcggcctgcaactgtgccaccacgcccgcagcagcgtcatcgtccagcgttttttgcagataaacagtgatttgcggactcggataatactgcgtcgccgcctggttaacgtttttgtacaccatataacagacgctgggcagcgtcagagaaatggcgataaccatcaccgttaaaaacgtggcgaacggtttgcttttcagatcctgcaatgcgccgtggaaggcatagcgcacctgttcgttgaaaacgttggttttgcgatttaccggttttgggctggatttcgcgcgttttggtgcgttacgaccgccgtcgccactgccgccgacgcttttacggaagcgatcaagacgcccgccaaactgccgaatatgattgattgcatcgcgcttattcatggcccacgcctccatgcaagtgaccatcgctcagggtgagcatgcgataggaacgccggctgatcaggttgatgtcgtgcgttgccatcaatacggttaccccaacgcggttaaactcttcaaacagacgtaaaatgccttcgctcagcgcgtcgtccaggttaccagtcggttcgtccgccagcagtaccgcgggcttgttcaccaccgcgcgggcaatgccaacacgctgttgttcaccgccgctaagctgaatagggaagttcttcgctttgtccagtagcccgactttatccagcgccgcgctcacccggcgacgaatatcgtcaccgctggcaccggcgataatcagcgggatcgccacgttatcgtagacagtacggtccatcagtagatggtgatcctggaaaatcatgccaatctggcggcgcagaaacggaacttcacggtttttcagacgcgtgatgtcatggccgctaaaccagattttcccggcgctgggccgctcaatcccacagatcagcttcaggagggtacttttccctgcgccggaatgaccggtcagaaacgccatctcacccggctgcatatggaacgtaacgccctgcagcgcctgtctcccaccgagataagccttgctgacatgttcaaagcgaatcattgttaatcctctcgggcaaaaagtgcctctataaagtcgtccgccttaaacggacgcaaatcctcaatacgttcgccgacaccaatgtagcggatagggataccaaactggtcagccacgctgaaaattaccccgcctttcgccgtgccgtccagtttcgttagcgtgatgccggttaagccaacggcttcatggaacagtttggcctggcttaccgcgttctgcccggtgctggcatcaatagtcagcataacttcatgcggcgcttcaacgtcgagtttcttcatcacgcggacgattttcttcaactcttccatcaggtggcttttgttctgcaggcgtccggctgtatcggcaatcaggacgtcgatattacgcgctttagctgcctgaatggcgtcgaagataacagaggcggaatccgccccggtatgctgggcaatcaccggaatattgttgcgctgaccccagacctgaagctgttcaaccgcagctgcacggaaagtatcacccgccgccagcatcacgcttttaccctgctgctcaaactgacgcgccagcttaccaatcgtcgtggttttacccacaccgttgacgcccaccatcaggatcacaaacggcgctttgccttcaacattcagcggctcatcgactttcgccagaatctcgcccatctcttctttcagcaggccatagagcgcctcggcgtcacgaagctgcttgcgggatgcgccttccgtcagattggtgataattttacgtgtggtttccacacccacatcggcgatcaaaagctgctcttccagctcctcaaacagatcatcgtcgatttttttaccgcggaacaggctgataaatccggaaccgagattttctttggtttttaacaggctgcgtttcaggcgcgcgaaaaaaccttctttggtcggtttttcctgctcctgagcgatttcttccaccggctgctcttcttctgccggaggaaccaccatcaccgcctcttctgccgcttcggcagccagcgccgtttccagctcttcgtcggtaatttcttctttagccgcttcttcttccgccgcttcgacaatctctacggtttccgcttcagcctgccactcttctgggctaaccgcttcggcgttgacgtcttccggcaacggcagctcttcacgttcgatagccactggctccggcgtttcttctacgaccggttccggctgtgcaacgacttccgcttcaggctgcgctttttcactttcagcaacctgttcagtgacttccacaacgtcggcagcaaaagtttccgcctcggcttcagtatgcgcttgcggctgctcttcaacggcttgttcagaggccttcacaggctcttgcgcctgaacgatttcttctacaaccggttgttcattctgaacttctgtctctttttccggggtctgctctttttgaccaaagcccagccaggaaaaaaagccacgttttttttctttcgccatttgcgactacactcctcgctgttgcttcatggcacagcgttaacgctatgtacatagcagctaaaaaaatgatgaaatagtctatcacttaacttaattcacatcaccgcctgcaagtatgtgttatctggcggattgagcaatttatcatgaaaaaaccgaatcattccggcagcggccaaatccgcattattggcgggcagtggcgaggccgtaaactcccggttcctgatagcccaggtctgcgccccaccaccgaccgcgtacgcgaaacgttgtttaactggctggctccggtcattgttgacgcccaatgtctggattgcttcgccgggagcggcgcgctggggctggaagcgttaagccgctacgctgcgggggcaacgttgattgagatggatcgcgcggtttctcagcagttaattaagaatctggcgacactaaaagcaggcaatgcacgcgtggtgaacagcaacgcgatgagtttcctggcgcaaaaaggtacaccgcataatatcgtgtttgtcgatccaccgttccgccgtggcttgttagaagagacgataaatttactggaagataacggctggctggctgacgaagccctgatttatgtcgaaagcgaagtcgaaaacggtctgcccactgttccagcaaactggagtttacatcgggaaaaagtggcgggtcaggtggcttatcggctgtatcaacgcgaagcacaaggagaaagtgatgctgattaatattggtcgtttgttaatgctctgcgtttggggatttttaatcctcaacctggtgcatcccttcccacgcccgctgaatatcttcgttaacgtggcgctgatttttaccgtgctgatgcatggtatgcagctggcgctattgaaatccactttaccgaaagatggcccgcagatgaccaccgccgaaaaggtacggattttccttttcggcgtgtttgaactgctggcctggcagaagaaatttaaagttaaaaaataaccttattgttcgcctacaaagctgacaaagcgcgttcctttatagctcagcgtacctttatcgcccactgtcagggcgtggtactgctgggcgtcgaggcgaaacgtctgctccattcctccgctttgcggtttgaagcttgcctcatagcgtatactggtgcctgccggagtcacttcctgctggcggctacggcgatcgttaatcggtttttcccgcttgttgctcaccaccaccagcttttgctggagcggagccatatcattatcagctttttcccgtcgctgttgcataaaacgaaagcttgcggcgacgacaattaagccaatgataacaataaagaaaagaggtggtttgctcatctttatccctcatcggaaaatgcggaaataagcataccctgccagttatggtgttgtcatccgtccaccctcgccactaaactggaagcaagaccgtaggcattccgcttacgaaaaaataacgaattcaaggaactaagatgctttggagctttatcgctgtctgtctttccgcatggctatctgtggatgcaagctatcgtgggccaacctggcaacgctgggtgtttaaaccgttaacccttcttctcctgctgttactggcctggcaagcgccgatgttcgacgccattagctatctggtgctggcagggctgtgcgccagtctgctgggcgatgcgctaaccctgttgccacgtcaacgtctgatgtacgccatcggcgcgtttttcctcagccacctgctgtacaccatctatttcgccagtcagatgacgctctctttcttctggcctctaccactggtgctgctggttctgggtgcgctgttactggcgattatctggacgcgcctggaagagtaccgttggcctatctgcacgtttatcggcatgacgctggtgatggtgtggctggcaggtgaactgtggttcttccgtccgaccgctccggcgctctctgcgtttgttggcgctagcttgctgtttatcagtaactttgtctggctggggagccactatcgccgacgcttccgtgcggataacgcgattgctgcggcctgctactttgccggtcacttcctgatcgtccgcagcctgtatctctgataaaacttgactctggagtcgactccagagtgtatccttcggttaatgagaaaaaacttaaccggaggatgccatgagcactcctgacaatcacggcaagaaagcccctcaatttgctgcgttcaaaccgctaaccacggtacagaacgccaacgactgttgctgcgacggcgcatgttccagcacgccaactctctctgaaaacgtctccggcacccgctatagctggaaagtcagcggcatggactgcgccgcctgtgcgcgcaaggtagaaaatgccgtgcgccagcttgcaggcgtgaatcaggtgcaggtgttgttcgccaccgaaaaactggtggtcgatgccgacaatgacattcgtgcacaagttgaatctgcgctgcaaaaagcaggctattccctgcgcgatgaacaggccgccgaagaaccgcaagcaagtcgcctgaaagagaatctgccgctgattacgctaatcgtgatgatggcaatcagctggggtctggagcagttcaatcatccgttcgggcaactggcgtttatcgcgaccacgctggttgggctgtacccgattgctcgtcaggcattacggttgatcaaatccggcagctacttcgccattgaaaccttaatgagcgtagccgctattggtgcactgtttattggcgcaacggctgaagctgcgatggtgttgctgctgtttttgattggtgaacgactggaaggctgggccgccagccgcgcgcgtcagggcgttagcgcgttaatggcgctgaaaccagaaaccgccacgcgcctgcgtaagggtgagcgggaagaggtggcgattaacagcctgcgccctggcgatgtgattgaagtcgccgcaggtgggcgtttgcctgccgacggtaaactgctcagtccgtttgccagttttgatgaaagcgccctgaccggcgaatccattccggtggagcgcgcaacgggcgataaagtccctgctggtgccaccagcgtagaccgtctggtgacgttggaagtgctgagtgaaccgggagccagcgccattgaccggattctgaaactgatcgaagaagccgaagagcgtcgcgctcccattgagcggtttatcgaccgtttcagccgtatctatacgcccgcgattatggccgtcgctctgctggtgacgctggtgccaccgctgctgtttgccgccagctggcaggagtggatttataaagggctgacgctgctgctgattggctgcccgtgtgcgttagttatcagtacgcctgcggcgattacctccgggctggcggcggcagcgcgtcgtggggcgttgattaaaggcggagcggcgctggaacagctgggtcgtgttactcaggtggcgtttgataaaaccggtacgctgaccgtcggtaaaccgcgcgttaccgcgattcatccggcaacgggtattagtgaatctgaactgctgacactggcggcggcggtcgagcaaggcgcgacgcatccactggcgcaagccatcgtacgcgaagcacaggttgctgaactcgccattcccaccgccgaaagtcagcgggcgctggtcgggtctggcattgaagcgcaggttaacggtgagcgcgtattgatttgcgctgccgggaaacatcccgctgatgcatttactggtttaattaacgaactggaaagcgccgggcaaacggtagtgctggtagtacgtaacgatgacgtgcttggtgtcattgcgttacaggataccctgcgcgccgatgctgcaactgccatcagtgaactgaacgcgctgggcgtcaaaggggtgatcctcaccggcgataatccacgcgcagcggcggcaattgccggggagctggggctggagtttaaagcgggcctgttgccggaagataaagtcaaagcggtgaccgagctgaatcaacatgcgccgctggcgatggtcggtgacggtattaacgacgcgccagcgatgaaagctgccgccatcgggattgcaatgggtagcggcacagacgtggcgctggaaaccgccgacgcagcattaacccataaccacctgcgcggcctggtgcaaatgattgaactggcacgcgccactcacgccaatatccgccagaacatcactattgcgctggggctgaaagggatcttcctcgtcaccacgctgttagggatgaccgggttgtggctggcagtgctggcagatacgggggcgacggtgctggtgacagcgaatgcgttaagattgttgcgcaggagataaggcaaaccgatcgcaacattgagcgcgatcggtcccctcgcccctctggggagagggttagggtgaggggaaaaggcggcatcgaagccaatcagcccctatcaaccgcctttacgaatcaaataacgataaggcagtccatccgtctctttagcaaccagttcgtgttccataaaggtacaaaacccaggaatatcgcgggtagtggccggatcgtcggcgataatcagcaacgtttcgccaggctgcatattgcgcacggttttgcgcaccatcatcaccggttccgggcagcgcaggccaagcgcgtcgagtgtgtggtcagggctggaaaagagatcggtcattttcttctcatcacttaaaaaaacggcgctagtttacgccctgtgagtccgtaagcaaactaggttaacgattgcgtgaaaattaaccattgcattgtcaacgtaaagcagtatcatgcggcggctcgaaaaaagggtaagcacgttattatgttaaggtaacagacgtgtcgtacgtattgggttccctcaccccaatggttaatcaaaaaggtacaatatgaacgttttcagccaaactcaacgctataaggcgttgttctggttaagcttatttcatctgctggtgatcacctccagtaactatctggttcagcttcccgtctccattttgggtttccataccacctggggcgcgtttagctttccgtttatttttcttgctaccgacctgaccgtgcgtatttttggcgcaccgctggcccgacgcattatcttcgcggtaatgatccctgcgttattaatctcctacgtcatcagcagcctattctatatgggttcctggcagggattcggcgcactcgcccacttcaacctgtttgtcgcccgtatcgccaccgccagtttcatggcctacgcgctggggcaaatcctcgacgtgcacgtttttaaccgcctgcgtcagagtcgccgctggtggctggcaccgacagcgtccacactgttcggtaacgtcagcgacacgctggcctttttcttcattgccttctggcgtagcccggatgcctttatggctgaacactggatggaaatcgcgctggtcgattactgtttcaaagtgttaatcagtatcgttttcttcctgccaatgtatggcgtattactcaatatgctgttgaaaagactggcagataaatccgaaatcaacgctttgcaggcgagttaaaggttcgttatcagagttgtgataagatggatgaatgagccgttatggccgtttatcgaaaggaagaagtcaatgcgcaatctggttaaatatgtcggaattggcctgctggttatggggcttgcggcctgtgatgataaagacactaacgctacggcgcagggtagcgtcgcggaaagtaacgctaccgggaatcccgtcaacctgcttgatggcaagttaagtttcagcctgccagcggatatgaccgaccagagcggtaagctgggaacgcaggccaataacatgcatgtctggtccgacgccaccgggcagaaagcagtcatcgtcatcatgggcgatgatccgaaagaagatctggcggtgctggcgaagcgtctggaagatcagcaacgtagccgcgatccgcagctgcaagtggtaaccaataaagccattgagctgaaaggtcacaaaatgcagcagttagacagtattatctccgcgaaaggccagacggcgtactcttccgttattctgggtaacgtgggtaatcaactgctgaccatgcaaattacgctgcccgctgacgatcagcaaaaagcgcagaccaccgcagaaaacatcattaatacgctggttattcagtaagttttaagaactactggcggcctcagggacgtgttccggaggccgtttttttaatcgccacgtcagtaataacgcgattgcgaccagtcccgccgccgccagataaatcaccggtacgcccgcccagctcatcaccagcccagccagtggtccagtcacgccaaggcttaaatccataaatacggtgtaagttgccagcgccgccccctgattttgctgcggaaccgcttttaccgccactacacccaatgccgggaacaccaggctaaacccggcccccgccagtaagacgccgattttcgccatccacggcatagtcgccacgccaaccagtagcaggccgattatctcaacgctaaagcaaatcatcgctacgtttaagccaccgatacggttaatgccgttagggaataacaaacgcgtaccgacaaacgcacagctaaacagcgtcagcgcgaaagccgcaccgtcccaacctttagcgtcataaaacagcgtgataaaggtggcgatgacgccaaatccggcggaagccagtgccagcgccataccgtacagccagacgcgcccaagcaccgcgcgaaacggcagcggtttgcctttactggcttttaccgtcggacgcgggatcgccaacaaaatggccaccagcgccacgcccataatgattaacgctaacgcctgcaagccgccccagtgataaaacacgacgcctaacggcgcacccatcgccatcgccccgtaagtgacaatgccgttccagctaatcacccgcccgatatgcaggctgccaaccacgccaacgccccatagggtgcttcccgttccggcaaaactttgcccaatcccaaggatgacgcgccccaggcaaagtaataacaggctgatgacaggcagactggcggttaatcctgccgtcagataccccagaccgctcaaaaagcagccgcataaaccgaagacgacaatctttttgggtcccaggctatcggcgtaacgtccggcatgagggcggctcagcaaggtggcgaaatattgcaggctgataaccaatcctgcccagaaggcgctaaagcccatcacatcatggacatagcccggtaatacagcgagcggcaacccgatggtgaggtagctggcgaagttaaacatgactatagagacaatgcgcaaattcaggcgcaatccgtttagcgcgggttcggctacgggttcgggcatgaggatcaccacatttttacaacagtgtttcatttttaccacgtgctgacgtgaaaatcagcagtaagaatcagaatattgctggcgtgactcccgctacacttaatacaaaaagtcacaaggaagccccaatggaaacccctcaacccgataaaacgggcatgcacattctgctcaagctggccagcctggtagtgatcctcgcgggcattcacgcagcggcagatatcattgtgcagctgttactggcgctgttttttgccatcgtcctcaacccgctcgtcacctggtttattcgtcggggagtacaacgccccgttgccattacgattgtagtggtggtgatgctgatcgcactaaccgcgctggtcggcgtactggcggcaagctttaacgaatttatctctatgctgccgaagtttaataaggagctgacgcgcaaactttttaaattgcaggagatgttgccttttcttaatttgcatatgagcccggagcgaatgctgcagcggatggacagcgaaaaagtggttaccttcaccacagcgctaatgaccgggctttccggggcaatggcgagcgtgcttttgctggtgatgaccgtagtttttatgctgtttgaagtgcgccacgtcccttacaaaatgcgttttgcgctgaataatccacagattcacatcgcgggattacaccgcgcacttaaaggcgttagccactatcttgcattgaagacgctactcagtttatggacaggtgtcatcgtctggctggggctggagctgatgggggtgcagtttgcgctgatgtgggcagtactggcgtttttgctcaactacgtgcccaatatcggcgcggtaatttccgccgtaccgccaatgattcaggtgctgctgtttaatggtgtttacgaatgtattctggtcggcgcattgtttttagtggtccatatggtcatcggcaatattttagaaccacggatgatgggccatcgcctggggatgtccaccatggtggtatttcttagtttgttaatttggggatggctgctcggcccggtagggatgctacttagcgtgccattaaccagcgtgtgtaaaatctggatggaaaccaccaaaggcggtagcaaactggcgattttactggggccgggcagaccgaaaagtcggttaccgggatgaggcgacaagtgatacgatacgcactttcattttccattaaacgttggccctgatatgtatcggatagttctggggaaagttagcaccttaagcgcagctccactgccaccgggtttacgcgagcaagcaccgcaaggtccacgacgcgaacgctggctggcggggcgtgcattgcttagccacacgctttccccgctaccggagatcatctatggcgaacaaggcaaacctgcatttgcgccggaaatgccgctatggttcaacttaagccatagcggtgacgatatcgccctgctgttgagtgatgaaggcgaagtcggctgcgatatcgaagtgattcgcccgcgcgccaactggcgctggctggcgaacgccgtattcagcctcggggaacacgctgagatggacgccgtgcatcctgatcagcaactggaaatgttctggcgcatctggacgcgcaaagaagccatcgttaaacagcgtggcggcagcgcctggcaaatcgtcagcgtagacagcacctatcactccagcctgagtgtcagccattgtcagcttgaaaatttaagccttgcgatctgcacccctactccctttacgctcaccgccgacagtgtgcaatggatcgatagtgttaactgatccgcccacccgactgcccatctattgatccagaacaggtaatcagtatgacgaatacttaaaatcgtcatacttatttccgccatctattttaatccattggggttaccatgctctccacactccgccgcactctatttgcgctgctggcttgtgcgtcttttatcgtccatgccgctgcaccagatgaaatcaccaccgcctggccggtgaatgtcgggccactaaacccgcacctttacacgcctaaccagatgttcgcccagagcatggtttatgaaccattggtgaaatatcaggcagacggtagcgtgatcccgtggctggcaaaaagctggactcatagtgaagatggtaaaacctggaccttcaccctgcgtgatgacgtgaaattctccaacggtgaaccgttcgatgccgaggcggcggcagaaaacttccgcgcagtgctcgataaccgtcaacgtcacgcctggctggagctggcaaaccagattgttgatgttaaagcactcagtaaaacagagctgcaaattaccctgaaaagcgcctactatcctttcctgcaagaactggccctgccccgtcctttccgttttatcgctcccagccagtttaaaaaccatgaaaccatgaacggaattaaagcgccgattggcaccggaccgtggattttgcaggaaagcaaactgaatcagtacgatgtcttcgtccgtaacgaaaactactggggcgaaaagccagcgattaaaaagatcacctttaacgtcatcccggacccgactacccgcgcggtggcgtttgaaactggcgatatcgacctgctgtacggaaacgaagggttattaccgctcgataccttcgcccgctttagccagaatccggcttaccacacccaactgagtcagccgatcgaaaccgtgatgctggcgctcaataccgccaaagcccccaccaacgagctggcagtacgtgaagctcttaattacgcggtaaacaaaaaaagcctgattgataacgcgttgtatggcacccagcaggtcgccgacaccctgtttgccccttctgtgccctacgccaacctcggcctgaaaccgagccagtacgatccgcaaaaagcgaaagcgttgctggaaaaagccggttggacgctgcctgcgggcaaagacatccgcgagaaaaatggtcagccgctgcgcattgaacttagcttcatcggcaccgatgcgttaagcaaaagcatggcggaaatcattcaggctgatatgcgccagattggcgcagatgtcagcctgattggcgaagaagagagcagtatctatgctcgtcagcgcgacggtcgttttggcatgattttccaccgcacctggggcgcgccatatgatccacacgccttcctcagtagtatgcgcgtaccgagtcacgctgacttccaggcacagcaaggattagccgacaaaccgctgattgataaagagatcggcgaagtgctggcgacccatgacgaaacgcaacgtcaggcgctgtatcgcgacattctgacccgtctgcatgacgaggcggtttatctgcctatcagttacatcagtatgatggtggtaagtaaaccggagctgggtaacatcccctacgcgccgatcgccaccgaaattccgttcgaacagattaaaccggtgaaaccttaatgttgcgttacgtattacgccgctttctgctgctgatcccgatggtgctcgccgccagcgtgatcatttttctgatgctgcgcctcggtaccggcgacccggcgctcgattatttgcgtctgtctaacctgccgccgacgccggagatgctggcctctacccgcaccatgctgggactggatcagccgctgtacgtccagtacggcacctggttgtggaaggcgctgcatcttgactttggtatcagtttcgccagccaacgcccggtactggacgatatgctgaacttcctgcccgccacgctggaacttgcaggtgcggcgctggtattaattctgctcacttccgtaccgctcggtatctgggcggcgcgccatcgcgaccgtctgccggatttcgccgtacgtttcatcgcgtttcttggcgtgagcatgcctaacttctggctggcgtttttactggtgatggcgtttagcgtgtatctgcaatggctacccgcgatgggttacggcggctggcagcacatcattttgcctgcggtttccattgcctttatgagcctggcgattaacgcgcgtttactgcgcgccagtatgctggacgtcgccggtcagcgtcacgtcacctgggcgcgtctgcgcggcctgaacgacaaacagaccgaacgtcgccacatcctgcgcaatgccagcctgccgatgatcaccgccgtggggatgcatatcggcgaactgattggcgggacgatgattatcgaaaacatctttgcctggccgggcgtcgggcgctatgcggtgagcgcgatttttaaccgtgactatccggtgatccagtgctttacgctgatgatggtggtggtttttgtggtctgtaatttgattgtcgatttgctcaacgccgcgctggacccgcgcattcgtcgtcatgaaggagcgcacgcgtgaactttttcctctcttcccgctggagcgtacgcctggcgctgatcattatcgccctgctggcgctgattgcgctcaccagccagtggtggctgccgtatgacccacaggcgattgatttgccgagccgcctgcttagcccggatgcgcagcactggctgggcaccgatcacttaggtcgcgatattttcagccggctgatggcagcgacccgcgtgagcctcggtagcgtaatggcctgcctgctgctggtgctgacattagggctggttattggcggcagcgccgggttgattggcgggcgcgttgatcaggccaccatgcgcgtcgccgatatgtttatgaccttcccgaccagcattctgagcttctttatggttggcgtgctcggcaccgggctgaccaacgtaattatcgccatcgccctgagccactgggcgtggtatgcacgcatggtgcgcagcctggtgattagtctacgccaacgcgagtttgtgctggcgagtcggctttccggtgcgggccatgtgcgggtgtttgtcgatcatctggcaggcgcggtgatccctagcctgctggtgctggcaacgctggatatcggccatatgatgctgcacgtcgcggggatgtctttccttggcctcggtgtgaccgcgccgaccgccgaatggggcgtgatgattaacgacgcgcgccagtatatctggacccagccgctgcaaatgttctggccggggctggcgctgtttatcagcgtgatggcctttaacctggtgggtgacgcactgcgcgatcatctggaccctcatctggtgacggagcacgcacactaatgccgcaacagattgaactacgtaatatcgcgctacaggccgcgcagccgctggtacacggtgtaagcttaaccctgcaacgcgggcgcgtgctggcgttagtcggcggtagcggcagcgggaaaagtttaacctgcgccgcaacgctgggcattttgcccgctggcgttcgccagacggcgggggaaattttagccgatggcaaaccggttagcccttgcgccctgcgcggcatcaaaattgccaccatcatgcagaacccgcgcagcgcctttaatccactgcacaccatgcacacccacgcgcgggaaacctgcctggcgttagggaaacccgccgatgacgctacgcttaccgctgccatagaagcggtggggctggaaaacgccgcgcgcgtgctgaagctgtacccgttcgagatgagcggcggcatgttgcagcgcatgatgattgcgatggcggtgctgtgtgaaagtccgtttatcatcgccgatgaaccgaccaccgaccttgacgtggtagcacaggcgcgcatcctcgatctgctggaaagcattatgcaaaaacaagcgccgggaatgctgctggtgacccatgatatgggcgttgtggcgcgtctggcggatgacgtggcggtgatgtctgacggtaagattgtcgaacagggcgatgtagaaacgctgtttaacgcccccaaacatacagtgacgcgcagcctggtttccgctcatctcgccctctacggtatggagctggcaagttgacctaatacggtatggagctggcatcatgactttacttaacatctccggcctttcccatcactatgcgcacggtggatttaacggaaaacatcaacatcaggcggtgctgaataacgtttccctgaccctgaaaagcggcgaaaccgtcgccctgctggggcgcagcggctgcgggaaaagtaccctcgcgcggttgctggtgggtttagaaagccccgcgcaggggaatattagctggcgtggcgaaccgctggcgaaactcaatcgcgcccagcgtaaagcgttccgccgcgatattcagatggtatttcaggactccatcagcgccgtgaatccgcgcaaaaccgtgcgcgagatcctgcgtgaaccgatgcgccacctgctaagtctgaaaaaatccgaacaactggcgcgcgccagcgaaatgctgaaggcggtcgatctcgatgacagcgttctcgacaaacgcccaccgcagttaagcggcggccagctccagcgcgtctgcctggctcgcgcgctggcggtcgaaccgaaactactgattctggatgaagccgtttctaaccttgatctcgtgttacaggcgggtgtcattcgcctgctgaaaaagctacaacaacagtttggcaccgcctgcctgttcatcacccacgacttacgcctggtagaacgcttttgccagcgggtaatggttatggacaacggacaaatcgtcgaaacccaggtggtgggagagaaattaaccttttcctctgacgccggacgtgtgctacaaaacgcggtattacccgcattccccgtgcgccgtcgcaccacagaaaaggtttaacgcaaatgcaacgagtcaccatcacgcttgatgacgatttactggagacgctggacagcctgagccagcgtcgtggttataacaaccgttccgaagctatccgcgacattctgcgtagcgccctggcgcaagaggccacccagcagcacggcacgcaaggtttcgcggtgctgagctatgtgtatgaacacgaaaaacgcgacttagccagccgcattgtctccacccagcatcatcaccacgacctctccgtcgccacgctgcatgtgcacatcaaccacgacgactgtctggaaatcgccgtgttgaaaggtgacatgggtgacgtgcagcattttgccgatgacgttatcgcccagcgcggcgtgcggcacgggcatttgcagtgcttgccgaaggaagattgagttacgccattgtcccaatcgtcttcctgaatcgcagcagcgcaatggtgaaaaatgcgccgccaattgccatcagcgtcagaaactgcggccagacgatttcgaatccggcaccccggtagaggatggcctgcgcgaggctaacaaagtgtgtcgtcggcatggtcagcataatgtcctgcaccatctgcggcatactttcgcgcggcgtggaaccaccggaaagcatttgcagcggcagcagcaccagaatcaccagcagccccagttgcggcatactacgcgctatcgtccccataaaaatgccgatactcgtggtggcaaacagactgagcgccacgcccagcataaacagcgggatgctgccttcaatcggtacgcccagtacacctttcaccatcagcaccaggcttaatccgcttaccaccagcaccaccagccccatgctccagatcttcgccatcatgatctcaaacggcgttatcggcatcaccagtaagtgttccaccgtgccgtgttcacgctcgcggatcagcgcgcttccggtcaatacaatcgccagcatggtaatgttgttgatgatcgccatcaccccgccaaaccacgcgggatcgaggttcgggttaaagcgcatccgggtttccaggcttaccaacggttcgctgttatcacggtagcgcgcgacaaagctgttcacttcaccgttgataatattctggatatacccattgccggtaaatgcctggctcatgcgcgtggcatcgacgttcacctgaatatccggctggcgtccggcgaggacatcacgctgaaaattaggcggaatatttatcgcgaaggtatagcgtccggcgtccagtccggcatccatctcatcggcggtgatcatctccggtggcaaaaaccacggacgatagaagctgttaacgatccggttgcttaactggctttgatccatatcggcaatggcgatcggcgcgaggttcaagcttcctggcgtaacggtcgcactgctatacacgctcaccgtaaagctgaagacaatcagcgtcagcatcgctttatcaccgagcagactgcgcaactctttgatacccagattaaaaatattgcgtaaatggcgcatcatccctcctgttttttcagcagcaggatacttaagcccatcaccagcgggatggctatcagtaacgggataaaaagttgccacaaatcagtcagatccagcgctttgctgaacgtcccgcgggcgatagtcagaaaatgactggtcgggtaaacctcgccgatccaacgtccaggcccttccaggctagctaccggatcgatcatcccggaaaactgtgtcgccgggatcaacgtgataatcgccgttccgaaaatggcggcaatctggcttttcataaaggtggagatcagcagccccattccggtggcaatgatgatatacagcagcgccgccagggtgagcgtcaggaaactgcctttatgcggtacgccaaacacaaacacgctcaggccgcagagcaggaaaaagttcagcatccccagcgcgatgtatggcaactgtttaccaagcaaaaattcactacgcgtggtgggggtcacgtaaaggttgataatgctcccaagctctttttcccgcaccacgctaagggcgcttagcatactcgggatcatcatcagcagaagcgggatcaccgccggaacaatcgctggcaggctttttacgtccgggttatagcgatagcgcgtctcaatattcatcagcccgctttggctggcgggtgtgctttgtcggctcgccacatcctgtaaccagctctggtgcatggcctgcacgtaaccttttaccgtttcagcacggctcggcatcgctccgtcgatccagacgccgagttccacaggcgtaccacgcgcgatatcgcgcccgaaattgggcgggatctcaatcgccaccgtgatatcgcccgcacgcatccgacgatcaagctcgtcataactggtgagcggcggctgttcgataaagtaacgggaaccggagaggttgagtgtccacgcctggctactgacggtctggtcgcggtcgagcaccgcaaagcgcaggttttccacatccatactgatgccgtaacccattatcagcatcaggatcaccgttcccatcagcgccagcgtgctacgtactggatcgcgtcgcagttccagcgcttcgcggcggctgtagctaaacagacggcgcaggctaaatccctgacgcggcgcgtgggtggtgtcgtgtaccacgggcggcgcttcggcttcgttgctctgccctgccgcttcctgcaaataggcgataaatgcctcttccagactggcggctccgcgtttctcaaccagttcctgcggtgtaccgctggcaagcacttttccggcgtgcatcagactgatgcggtcgcaacgttccgcttcgttcataaagtgggtggagatgaagatagtcactttgtcctggcggctgagatcgaccatcaactgccagaacatatccctcgccaccggatcgacaccagaagtaggctcatcgaggattaacatctccgggcgatgaatcaccgccaccgccaggctaagccgctggcgaatgccgagcggcaaactctccggcagaatatcttcaacgtcgttgagcttaaaacgctcgctcatttcagccactcttgcgggaatttccgcttccgggatgtgaaacaaacgggcatgtaactcaaggttttgccgcacggtgagttcgttatagaggctaaacgcctggctcatatagcccacccgacggcgggtatcgatatcttttggatcaaccggttgcccgaacagccacgcctcaccttcgctggcgggcagcagtccggtgagcattttcatggtggtggatttaccgcagccgttgctaccaagaaaaccaaaaatctccccgcgtggaatgcggaaattaacgtgatcaacggcaacgaaggaaccaaaacgcatggtcagatcgcgcgcttcgatggcaatctctgcgttttcaggttgatacggtgggatcactaccgcctgatgcgcctggcgttgcgcttgcggtaacagatttataaatgcttcttccagcgtagcgctttgcgtttgctgccgtagctcttcggcgctgccagttgccagcacttctccggcattcatcgctaccagccagtcgaagcgttcggcctcttccatataggcggtggcgaccagcacgctcatattgctctgccgctggcgaatactgtcgatcagatcccagaactgggagcgggagagcgggtcaacccccgttgttggctcatcaaggatcaacagttccgggtcgtggattaacgcgcagcacagcccaagtttttgcttcatcccgccggagagtttccctgccggacgatcgcgaaacggtgctaacccggtgctggtcagcagctcattgattcgcacttcccgctccgctttgtcgtgaccgaacaggcgagcgaaaaaatcgacgttttcatacacgctcaaggtgtggtagaggtttttgcccagcccctgcggcatccaggcgatgcgcgggcagacgtcgcggcgatgcttcgggtcgcgcatatcgccgcccagcaccatcacattgccctgttcaatgacgcgggcaccggaaatcaagctcaacaagctgctcttcccgacgccgtccgggccaatcagcccgaccatacagcgggccggaatatcgagagtgatattgttcagcgcaacggtttttccataatgctggctcacgcccgccagttgcgcgacaggcgggacgggaaccagttccagatgcgtcattgcggcaacctcaccacgaggtcgtcaggccacggaagttcttcattcacccgcacccacgctacgcccggcaaaccggttttgacatattccagatgctgctggagtaattccggtgggatacgcgctttgacgcggaacatcagtttcagccgttcatcgctggtttcgacggtttttggcgtgaactgggcgacactggcgacaaaactgatggttgcaggaatacgcagatctggcgcggcatcgaggatcagccgggcttcaccgcccagtttcagcgtgcccgcctgttcggttggcaggaagaaagtcatatagacgtcgctgagatcgaccatattcagcacccgaccgcctgccgccagcacttcgcctggctcggcaacccgatactgcacgcgtccgtcacgcggggctttcagttcgctgtcatcgatatctgcggcaatgcgccgttcagtggcttgtgccgcttcgacgcgggtttgcgcctgaatgatattggtgcgtgccgcttctatagccgctttagaagcgcttacctgagctttcgcgctttccagcgcagctcgggcgctctcagcggcggcgcgatcgtcatccagctgttgcgcagaaatagcccctcgttgggccagactacgggaacgcgtatgacgttttgctacggagtccagttctgcctggcgttgattaaccaggctctgtgcggcacgagtttcgctttgtcgttgctccagcaaagcctgcgcggcagcaacggcgctttgtgcctctttgatttgcgcgatggcttccagtcgctgttcctgcaacacgcgagtatccatcttcgccagcacttcaccttcgcgaacaaacttgccttctttcaccagaatggtgtcgatacgcccggcaattttgctggcaatatccacttccgtcgcttcaatgcgcccattactgacagcaaagccttccggcacacctgccgggcgcaacagccaccacgccacgatagccgccaccgccagtaacccgacaacccaccacgccagatggcgcttactcttatccataatcgacccgccataatccctgtaagcaaacgacgcgtgttacaactgccgccgaacgacgttcagcggattcttccatccgggataagaaggaaacggcaaatacgaccagcgcgcagagcattgagcgccaacggggaaggcttagtgaaaacgggtagtaatgttgtcatcatcagcattcctggccgtaaatgaaacacgcatactcataagtgtgatctataaaactggctgacaaaacggtatccatcctgttggatagcgtttcacgcctgttcagttgcaggaacagagcattcctttttacgttttatcaacagtctcaaccagatagtaacattaatattcatgttgtctatggttcagagctgtaacattgtgcgccttctaatcaaaggcataagtccatttctgtttttttcatgctggtaagacttccagggagtggttatctcaggccctgcaccagggttaatttggcaattatgcatgctgaacattcttccagcatgtttactgtcacgggcgttaagacctaaaactgtccccgtttcgcctatgcgttctcttccaccatttccgttatgtgcaacaacttgatttatacctaacatttgactacatgctaatagtgcttcaagtttaggtctgtaatctgtgctaacagaaaaataacgattaaaggatcgacaagagatagcccggctagttttaaactttttgccattaattatagcatgatgctttttattgataattgccgctaattcgaccggatcgagagcattggtcatttcatcaatagagactgttatcggtcctataatgtaacgttttcgctgatcatcaaaagttatcccatgatgatttgccattattttgtatttggggtcatagaaacatacaggataatcttttatcccagagtaggtatcctcatcgagtggtttcatacgcgtgaagttctgcatatagttaccattgcaattcgtttcatgatttccagctaatacatgaacattttcattgatactcattatgcgttttaacaaatcgatgataaattgatcaccacagatattgctaaatcgatcgccggtttggtcgcccagaaacgtacatggcgtcacagcgtctttattaataactaaataaggctgaagactttctaaaataatgtctcttctgttcaggatactgattattgtattaacattagtgttaagttgctcattaaagttctcccttagcaatacgttgagaacttcatcttctatattaagcaactggctaaggaaattttctccttcagccatgattcccaaatgtcccgttgcgaaaagcgcgaacaaaactgcaccgacactgccatcggtatcaccaaaataggttggtctggtacttgtgggatcaacgggtaaacaattggagaaatagattctgtcagcgaactggggttttatcattgtttcgaatttaatatcagatacattatattggcttattttccagttccagatgggtttgtagctctcagtaactgcaacatcattagcattatcatttactgtcatattattaagtaaataaacaatactgcaccaattaatatcggtattatcaagagagcaaccgtaatttttgctattaattgtcacaataaactgataattattattcctacgtagaatatgagcacgcatgccgcttagcatactatatttttcactatgatccgtttgtatggtaaaactaattttgtcatcttgaatagattgttggaaccgttctatttgccaatcatctattttttccacaacctcaccgagcattgtcctggcaatactacttatatcatcacctataccatttgcaatatacccaaacagttctttagtgaagttggtaacatgctcttgcaccatatcatttgttgcgattgtcgttgtactgtcgttagtgcctgccacagttccaattttcatattttacctcatattatttaccgcgaggaatacatagttaacattttatcttatgacatacacctcatgttcgatgggaaaataattatattttgcacaaatcattcagcctcaaagcataatatgaaatttcttatctcatagcagagaaagtccctaaagattgtagaggcgtcatcagaacatgcctctacaatcgattaagaaaacctatgaaatactggcaggattaaaaagacataccaccgtattcatggagttttaatgtagttgaaaacaactaagcccactggaataaattattttattatttttatcacgtgcttccttcagggaatttagccccataataccattatcaaattgttgattatgatctaccccgggcccatgatgcccatatttttgtctaatgtatttgctggggtcttcacctttgagtgtctccccacatatgaagatacgttcacgtgctggtctgaaatcagtagtgttatcaaaataattagcatatacaggtgtgggtttcaaagtattgcttcggattagatggaatagaggatcatccatgtgttctttatgttttttattaaaaatattggctaattcctcaggatcagtaggatttttcatctgattaaatggaacctgcaaagcacgctgacaataacatttttttcttcatctcttattattccgtgatgactggttaaaacttgcctttcactgtcataattacaaacatcgagcgttttaattaagttatacgtatcaccggcagagagtttatgatttgctagtcgtgcagtatagttaccattaaaattgatttcatgatttccagccagaacgacgacatttttattaatacggctatctttattaccctccatatttcgcatagaatttagcaaagtaaggatatatttatcaccaaaaatagtactaaatctatcgcctgtatgatccccaaggaagatacaaggggttatcgcatcgtcctttaaaaaaacatgttgatgcaactcattcaagatcatgtctctcgtatttaataaatcgtagagcactttattatttttatgtttgtatgcagaactagccatctcttcgtgttttaataattcacataataaactccaacccttttccctgatgcctatatgcccactaacgagcaatgcataaagtacagcgcctactcttccatctgtatcgccaaaataagccgtgttggcattttgtgggttaatcacaccacactgtttatagaagtctattttactaaacacagatttaacatagctatcaaacttttccttagtaaacgtctctttagagacatcccaacgccagtcaggtttgaaattaccactaagaagagtaaagaaatttctcgctatgatagaaagcccatcaactttataaattatatcacttttatctccagaggaattaataaaataataaccgcccttacactcaacagtaacggtaatgggagagcttaattttaacacatggttattgtctggtataattgtaaagataaacgtatcagtagtattgtcggcgaatctattatattcttgaatatctatagaaggttcactattataaaaccatactttctccatctggtgactacgatcatttaccttccagtgaccatgttgcaggaaatagatgatatgcaggccaaaatcgttatctatttggctatcattatccagtttatcaaattcaactatctttgcacgatgtgttttatcaaccttgccatggtgttgatgactgttaactttatcactatgcttatcttgatggctactagagatgtttctaatctgattgtcaattgctttcataaataacctgtgatatttttgaattgtttgtaacaaaataaatgatacttgtctgaaaaacagatttacgacgatataaaataataatacttatatgttcgctgattttaagcaccgagactatccggtcttttaccaaataatgaagaataatccctccctggaagataattgtaaaaaacaacagcataagaattaatcttaggataaatttttatttatcatggccttttgaacgctgaaaagtagcgctctgcaaagtaaaccccgctatagttatgctatgcatttgtctttaatgatatctcgtcattatattaacaggatgaaattatcattaatgcatatttcaatattagcagggatacctgaggagtttaaagtgaacatatatatcgggtggcttttcaaattaatccctttgattatgggcttaatttgtatcgcgttaggtggctttgtgctggaaagtagtgggcaaagcgagtatttcgtcgcgggtcatgtgctgatttctctggcggccatatgcctggcattattcactaccgcatttattatcattagccagctcacgcgcggcgttaatacgttttacaatacattgttccccattattggctatgcggggagtattatcaccatgatatggggttgggcactgttagcaggcaatgatgtgatggcagacgagtttgtcgccggccatgttattttcggcgttggtatgattgccgcctgtgtaagcacggtggcagcgagttccggtcactttctgctcattcccaaaaatgcagcggggagcaagagcgacggaacaccggtacaggcttattctagtttaatcggtaactgcctcattgccgttcccgttttactcaccctgctcggtttcatttggtctattacgctgttacgtagtgctgacataactccgcattatgtcgcgggtcacgtattgcttgggttaaccgcaatctgtgcctgtctaattggccttgttgccacaattgtccatcaaacacgtaatacgtttagtactaaagaacactggctgtggtgttattgggttatttttctcggcagtatcacggtactgcaggggatatacgtcttagtcagttccgatgcaagcgcccgactggctcccggcattattcttatttgcctcggaatgatctgttacagcatattcagtaaagtctggctactggcactggtatggagacgtacctgtagcttagccaacagaataccgatgattcccgtcttcacctgcctgttttgccttttcctggcaagctttcttgcggaaatggcgcagaccgacatgggatattttattcctagccgagttctggtcggtttgggagcggtatgctttacgttgttcagtatcgttagtatattagaagcgggttctgctaaaaaataattgcaacgtaccggataaaaccagcgttgaccatttgcgtaacgctggtttttcttaggcatcatgaaataacgcagcattaatgcatagtggttaagtataaaaaacagcaaagttactgtttttttcaacctgttcatatttcataaagatctggccactgagtgagttttcaatcacctttccatccaccttatattaagcatggagggtttcagttcacgggctcattagaaaataatcacaagataaccactatcaaaattagctcatttttaatgcgactctaataattttcatctttaggaaataggtcaggagctctttgctgcaatcaaatcctgcgcacaagcccacgcactgctccacgcccactggaagttatagccccccagccagccggtgacgtccatcacttcgccgatgaagtacagcccaggcactttgcgcgcttccatcgtccgactagagagttcgttggtgtccacgccgccgagcgtcacttcggcagtgcgatagccttcagtgccgttgggttgtacgcgccagtcggtcaatgtgctaatcagtgcctgttggtcacgcacgttgagctgttttaggctaacatccgggatttgcccgagttgctgtaagcgttcaaccaaccgcttcggtagatgaaccgccagtgtgtttttcaggctttgattcggatgtgcgttacgctgctcattcaggaaggtttcgaggtccacatccggtagcagattgatgctgacaaattcccccggttgccagtagctactaatctgcaacaccgccggtccagacaagccgcggtgggtgaagagtaagttctcacggaaaacggtgccgttttcagcggtaatcacggaaggcaccgccacgcccgccagcacctgtaactcttcgagcaacggtttatgcagagtgaatggcaccagacccgcgcgggtcggcagcacgttgaggccaaattgttcggcaatcttataaccaaacgggctcgcgcccagccccggcatactcagcccaccagtcgcgatgaccagcttttcgcaaccgacagtcatgccgttcagatcaagcgtgaagcctgtttcatccttcgccacactcagcacttcgctacgcaatctgaaggtcacattgcccttctcgcactcatccaccagcatgtcgacaatctgctgcgcggagtcatcgcagaagagttgccctaacgttttctcgtgccaggcgatgccgtgtttattgaccagatcaatgaaatcccactgggtaaaacgtgcgagtgcagacttacaaaaatgcggattctggctcagataagcgcctggttcgacataaaggttggtaaagttgcagcgcccaccgccagacataaggattttgcgccctggttttttaccattatcgatcagcagaacccggcgtcctgcctgacctgccagcgcagaacagaacatacccgccgcaccagcgcctataataatggcatcaaacctttccacgttgcgctcctcttagaaaaaacgggcgtgaattgtaaagattcctcagtggtcgcaccagcatcaatattactaaaaggaagtatttgcctgaattatataagataattattttttgagtgaaatccatacagggggcaaatcaaaaaaagtctatatttcactttgcccgcgccgcgaaagtcactgataatgcgccgcgttcatgtcctcaaaatggcgtaacgtcctatgctacatttgtttgctggcctggatttgcataccgggctgttattattgcttgcactggcttttgtgctgttctacgaagccatcaatggtttccatgacacagccaacgccgtggcaaccgttatctatacccgcgcgatgcgttctcagctcgccgtggttatggcggcggtattcaactttttgggtgttttgctgggtggtctgagtgttgcctatgccattgtgcatatgctgccgacggatctgctgcttaatatgggaagctctcatggccttgccatggtgttctctatgttgctggcggcgattatctggaacctgggtacctggtactttggtttacctgcatccagctctcatacgctgattggcgcgatcatcgggattggtttaaccaatgcgttgatgaccgggacgagtgtggtggatgcactcaatatcccgaaagtattaagtattttcggttctctgatcgtttcccctattgtcggcctggtgtttgctggcggtctgattttcttgctgcgtcgctactggagcggcaccaagaaacgcgcccgtatccacctgaccccagcggagcgtgaaaagaaagacggcaagaaaaagccgccgttctggacgcgtattgcgctgatcctttccgctatcggcgtggcgtttagccacggcgcgaacgatggtcagaaaggcattggtctggttatgttggtattgattggcgtcgcgccagcaggcttcgtggtgaacatgaatgccactggctacgaaatcacccgtacccgtgatgccatcaacaacgtcgaagcttactttgagcagcatcctgcgctgctcaaacaggctaccggtgctgatcagttagtaccggctccggaagctggcgcaacgcaacctgcggagttccactgccatccgagcaataccattaacgcgctcaaccgcctgaaaggtatgttgaccaccgatgtggaaagctacgacaagctgagccttgatcaacgtagccagatgcgccgcattatgctgtgcgtttctgacactatcgacaaagtggtgaagatgcctggcgtgagtgctgacgatcagcgcctgttgaagaaactgaagtccgacatgcttagcaccatcgagtatgcaccggtgtggatcatcatggcggtcgcgctggcgttaggtatcggtacgatgattggctggcgccgtgtggcaacgactatcggtgagaaaatcggtaagaaaggcatgacctacgctcaggggatgtctgcccagatgacggcggcagtgtctatcggcctggcgagttataccgggatgccggtttccactactcacgtactctcctcttctgtcgcggggacgatggtggtagatggtggcggcttacagcgtaaaaccgtgaccagcattctgatggcctgggtgtttacccttccggctgcggtactgctttccggcgggctgtactggctctccttgcagttcctgtaatcgtacgcaccaaaacgagcgggtcagctggcccgcttcagattgtgacatagtgcgctttgttcatgccggatgcggcgtgaacgccttatccggcctacaaaaacatgcaaattcaatagattgcagagattatgtaggcctgataagcgtagcgcatcaggcaattttgcgtttgtaatcagtctcgagcgggtcagtttactggcccgctttttttatgcgttattattgctgaagtgcttaatgccaaatcatcaatgcaatcaggctgaccaccaccagaccacacaatgcgctggtcagaataaactgccgacgcacccgctcacagcggcgaataaattcatcatcgtgatgatcgcgataacgttgggcatagatataccaaacgagacgcacctgtttgttgggttggccatgattggtaaaaaagccccctccatcaacatattgatagagcaatggatcgcagttacgcagtaccactaacaacgcgcgtagactactgaaatagcgcgccatgttaacaatgcaaacgacacataaagcccaaaataatgcgacggtgcttatcatacctcctccccggcgacctgcccgcggagttccaccccggggctaccgctcccgatacgctgccaatcagttaacaccaggtcctggagaaaccgcttttgtggtgaccaacatacgagcggctctatagatagtgtaggagatcaggttgttttttttccagaaggttaaccactatcaatatattcatgtcgaaaatttgtttatctaacgagtaagcaaggcggattgacggatcatccgggtcgctataaggtaaggatggtcttaacactgaatctttacggctgggttagccccgcgcacgtagttcgcaggacgcgggtgacgtaacggcacaagaaacgctagctggccagtcatcgacaactttatggaaggagtaacactatggcttataaacacattctcatcgcggtcgacctctccccggaaagcaaagttctggtagagaaagcagtctctatggctcgcccctacaatgcgaaagtttctctgatccacgtagatgtaaactactctgacctatacaccgggcttattgatgtgaatctgggtgatatgcagaaacgcatctctgaagagacacatcatgcactgaccgagctttccactaatgcaggctacccaatcactgaaaccctgagcggcagcggcgacctgggccaggttctggtcgatgcaatcaagaaatacgatatggatttggtggtttgtggtcaccaccaggacttctggagcaaactgatgtcttccgcacgtcagctgatcaacaccgttcacgttgatatgctgattgttccgctgcgcgacgaagaagaataatcttccctctacgacgtgttcctgaacgcccgcatatgcgggcgttttgctttttggcgcgccttgttacctgatcagcgtaaacaccttatctggcctacggtctgcgtacgcaatcaaaatccccagccaatacaacatttaacaccatcatattttccatcattagtgtgatcatctggttattttctgttgtaatagtgtattaatctattcaccgcatcaatattaagaatctctgacagatgtaaactttttcgcgcgttatcccttacgcgttcatacttttcaggatggtattggaaggttaataaatatgaatacaacaacacccatggggatgctgcagcaacctcgcccatttttcatgatcttttttgtcgagttatgggagcgattcggctactacggcgtgcagggcgtactggcggttttcttcgttaaacagcttggattcagccaagagcaggcttttgtcacttttggtgcttttgctgcgctggtctatggcctcatttccattggcggctatgtcggcgaccacctgctggggaccaaacgcaccattgttcttggagcacttgtgctggcgattggctacttcatgaccggcatgagcctacttaagcctgacctgattttcatcgccctggggactatcgctgtcggtaacggcctgtttaaagctaacccagccagcttgcttagcaagtgctatccgccgaaagatccgcggcttgatggcgcattcaccctgttctatatgagcatcaacatcggcagcttgatagcgttaagcctggcccctgtgatcgctgatagattcggttatagtgtcacctacaacctgtgcggggcggggttaattatcgcattactggtttacatcgcctgtcgtggaatggtgaaagacattggttctgaacccgacttccggccaatgagcttcagcaaactgttgtacgtgttacttggcagcgtggtgatgatcttcgtatgcgcatggctgatgcacaacgtagaagtcgccaatctggtgctgattgttctctccatcgtcgtcaccatcatcttctttcgtcaggcattcaagctggataaaaccgggcgcaataaaatgtttgtcgcctttgtcctgatgctcgaagcggtggtgttttacattctctacgcccagatgccaacaagcctgaacttctttgccatcaacaacgtgcatcatgaaattctcggtttttccatcaacccggtcagcttccaggcgcttaacccgttctgggtggtactcgccagcccaatactggcaggcatttacacgcatctgggtaacaaaggcaaagacctcagcatgccgatgaaatttactctcggcatgtttatgtgcagtctgggctttttgacggcggcagctgcgggaatgtggtttgcggatgcacaagggctgacaagcccatggtttatcgtgctggtgtacttattccagagcttaggtgaactgtttattagcgcccttggcctggcgatgattgctgccctggtgccgcagcatttgatgggctttattctcgggatgtggttcctgacgcaggctgccgcgttcttgctgggcggctatgtggcaacatttaccgcggtgccggacaacattaccgatccgcttgagacgttgcccgtctataccaacgtgtttggtaagattggtctggtcacgctgggcgttgcagtagtgatgctgttgatggtgccgtggctgaaacgcatgattgcgacgccggaaagccattaattattcttgcagaaagcagggtagcgttatcgctaccctgttttagttttacactggcgtacctgcatagatatcaaagcgatgccctttagtgactaccgcgtttggcgtggcgacattcgccagcggtggcgcgtagtccgggcgctttaccaccacgcgtttggtcgccagcaagcgtgcaggctccagtaatccatcggcatcaagatccggtcccaccaggctctgaaagacacgcatctcttttttcactagcgcgcttttctgcttatgcgggaacatcgggtcgagataaaccacctgcgggcgcggggtaatatcagtcagcgccgtcaggctggaggcgtgaattaactgcaaccgctcctgcaaccagccgccgatttccgcatccgcataaccacgcgccaggccgtcgtcgagtagcgcggcaaccactggattacgctccagcatccgcacgcggcagccgacactagccagtacaaaggcatcgcgcccaagtcctgcagtggcatccaccacatccggcaaataatcgcctttaatgcccaccgctttcgccaccgcctcaccgcgaccaccgccgaatttgcgtcggtgcgccatcgctccgccaacaaaatcaacaaagatgccgccaagttttggctcatcacgcttgcgcaattccagatgttccggcgttaacaccagcgccatcaggttgtcttcatcgtgctccagcccccagcgggccgccagaacagataaggcaccgtctccggtgcctgtttcatcaattaagcagattttcactgaatgatcagcccttaatgccgtaatgctccagcatcgcatccagctgcggttcacgaccacggaagcgtttgaacagatccatcggctcttcactaccgccacggctcagaatgttgtcgaggaagctctgcccggtttcacggttgaaaatgccctcttcctcaaagcggctgaaagcatctgccgccagtacgtcagcccacaggtagctgtagtaacctgcggcataaccaccggcgaaaatatggctgaaagcgtgcgggaaacggccccaggacggagatggcaccacggcaaccagtttcttgatttctgccagagtttcgaggatttttgccccctgatccgggcggaactcggcatgaaggcggaaatcaaacaggccgaactccagctgacgcagaataaacagcgccgcctggtagttcttcgccgccagcattttatccagcaactctttcggcagcggttcgccggtttcatagtgaccagagataaacgccagcgcctccggctcccagcaccagttttccataaactgactcggcagttcgaccgcatcccacggcacaccgctgataccggaaacaccagcggtttcgatgcgggtcagcatatggtgcaggccgtgaccgaactcgtggaagagggtgatcacttcgtcgtgagtgaacagcgccggtttaccatttaccgggcggttgaagttacaagtcaaatacgcgaccggtttttgcaaagaaccatcagctttacgcatctggcctacgcagtcatccatccacgccccgccgcgcttgttttcacgggcatacagatcgaggtagaagctaccgcgcagttcgttattttcgtcatacagttcgaagaaacgtacatccggatgccagacatcaacatctttacgctctttagcggtgatgccgtaaatacgcttaaccacttcaaacaggccgttaaccgctttgttttccgggaagtacggacgcagctgttcgtcactgatgctgtagaggtgctgtttttgtttttcgctgtagtaagcgatatcccacggctgcaactcatcgacgccaaattcggctttggcaaaggcacgcaattgcgccagctctttttcgccttgtggacgcgcgcgttttgccagatcggttaagaaatccagcacctgctgcgggttttctgccattttagtggcaagggatttaaaggcgtagttttcaaagcccagcagttgcgccagttcgtgacgcagcgcgaggatctcttccatcaccttgctgttatcccatttaccggcgtttgggccttgatcggaggcgcgggtgctgtaagcgcgatacatctcttcacgcagagcctggttgtcgcagtaggtcattaccggcaagtagcttgggatatccagcgtcagcaaataaccttccagctctttcgcttcggcctgggcttttgccgcagccagcgcgctttctggcatccccgccagctccgcttcgtcggtaacgagtttggtccagcccattgtcgcatcgaggacgttgttgctgtactggttgcccagttcagaaagacgggtcgcaatttcgccgtaacgctgctgtttctctttcggcagacctatgccagagagttcaaagtcgcgcagtgcgttatcaaccgctttcttctgcgccgtgttcagcgtggcgtaatgatcgccatcgcgcaggtcgcgatacgctttatacagcccttcatgttgccctacccaggtgctgtattcgctcagcagcggcagggtttgttcgtaggcttcacgcagttccgggctatttttcacgctgttcaggtggctgaccggggagaagatacgccccaacacatcgtccacttccgccagcggctggcagagattttcccaggtgtacggtgccccttgcgctactacgcgctccacgttttcgcggcagtcgttcaatgccttagtcacggctggaacgacatgttccgggagaattttagaaaacggaggcaattcaaagggagtcagtaacggattcgtcattcgcgcagtcctggttaaagaggttaaggaagcgctcaacaggcgctttacataatgtgtgtagcatggggttaagtgtagtgaatttcaatgagaaacgttacgctttcgcggcggcggcctcttttcggtatactgtcctgatacgcttttgtgcgccccgaatacgggccgatttttacttaccggaacacctttacccatgctcagttatcgccacagctttcacgctggcaaccacgccgacgtccttaaacataccgttcagagcctgatcatcgagagcctgaaagagaaagataaaccgtttctctatctcgacacccacgcaggggccgggcgttatcagttaggcagcgaacatgccgagcgtaccggcgaatatctcgaaggcatcgcccgtatctggcagcaggacgatttgcccgcagaactggaggcgtacatcaatgtggtaaaacacttcaaccgtagcggtcagttgcgttactaccccggtagcccgttgattgctcgcctgctactgcgtgaacaggacagcctgcaactgaccgaactgcacccgagcgattacccgttgttgcgttctgaatttcagaaagatagccgtgcgcgtgtcgaaaaagccgacggtttccagcagcttaaggccaaactgccgccggtttcccgccgtggtttaatccttatcgacccgccgtatgaaatgaaaactgactatcaagcggtggtcagcgggatagcagaaggttacaaacgtttcgccactggtatttacgcactgtggtatccggtggtgctgcgtcagcaaattaagcgcatgatccacgatctggaagcgaccggtattcgcaaaattctgcaaattgaactggcggtactgccagacagcgatcgccgtggcatgaccgcttccggcatgattgtgattaacccgccgtggaaactggaacaacagatgaataacgtgctgccgtggctgcacagcaaactggttccggcaggcaccgggcacgccaccgtaagctggatcgtgccggagtaattgcagccattgctggcacctattacgtctcgcgctacaatcgcggtaatcaacgataaggacactttgtcatgactaaacactatgattacatcgccatcggcggcggcagcggcggtatcgcctccatcaaccgcgcggctatgtacggccagaaatgtgcgctgattgaagccaaagagctgggcggcacctgcgtaaatgttggctgtgtgccgaaaaaagtgatgtggcacgcggcgcaaatccgtgaagcgatccatatgtacggcccggattatggttttgataccactatcaataaattcaactgggaaacgttgatcgccagccgtaccgcctatatcgaccgtattcatacttcctatgaaaacgtgctcggtaaaaataacgttgatgtaatcaaaggctttgcccgcttcgttgatgccaaaacgctggaggtaaacggcgaaaccatcacggccgatcatattctgatcgccacaggcggtcgtccgagccacccggatattccgggcgtggaatacggtattgattctgatggcttcttcgcccttcctgctttgccagagcgcgtggcggttgttggcgcgggttacatcgccgttgagctggcgggcgtgattaacggcctcggcgcgaaaacgcatctgtttgtgcgtaaacatgcgccgctgcgcagcttcgacccgatgatttccgaaacgctggtcgaagtgatgaacgccgaaggcccgcagctgcacaccaacgccatcccgaaagcggtagtgaaaaataccgatggtagcctgacgctggagctggaagatggtcgcagtgaaacggtggattgcctgatttgggcgattggtcgcgagcctgccaatgacaacatcaacctggaagccgctggcgttaaaactaacgaaaaaggctatatcgtcgtcgataaatatcaaaacaccaatattgaaggtatttacgcggtgggcgataacacgggtgcagtggagctgacaccggtggcagttgcagcgggtcgccgtctctctgaacgcctgtttaataacaagccggatgagcatctggattacagcaacattccgaccgtggtcttcagccatccgccgattggtactgttggtttaacggaaccgcaggcgcgcgagcagtatggcgacgatcaggtgaaagtgtataaatcctctttcaccgcgatgtataccgccgtcaccactcaccgccagccgtgccgcatgaagctggtgtgcgttggaagcgaagagaagattgtcggtattcacggcattggctttggtatggacgaaatgttgcagggcttcgcggtggcgctgaagatgggggcaaccaaaaaagacttcgacaataccgtcgccattcacccaacggcggcagaagagttcgtgacaatgcgttaaatgttaaagggctaagagtagtgtgctcttagcccttaattacgtttccgctatcagttcagaagctgaagcagaaagcggatcagttccagcagcgcaattaacgcccctagaacgatgattgctttatcaatcacccgttttctccatgcgatggagtgagaatgcatccgcttactcatccactgcctgtcacggcgcatgtctcattgttagataagaactctctcactccggccagagcatcagttaacggcaccacccgtacttctgaccaggactttgaaagcgtttatgcgcattgccagagtgaaaatgcctcagagctaactggataatcatacagtacatgcaggttataaaaccagcacgtccttgcaatagtttcagtatggtattagcattgatgcgttagatgatggctatctcactccagtcagagccaccaactcagggctggaaagtaaaaaaccgacgcaaagtcggtttttttacatccggattcggacaaggcttaatatgacgatgacccagtgaaagtatataaatcgtcactgcgatatataccgaagtgctccctccgccagctgaagaaatcgctaattcttgcaatgttagccactggctaatagtattgagctgttagataagaactctctcactccagccagagccaccaactcagggctggaaagtaaaaaaccgacgcaaagtcggtttttttacgtcctgattcagacctcctttcaaatgaatagccaactcaaaattcacacctattaccttcctctgcacttacacattcgttaagtcatatatgtttttgacttatccgcttcgaagagagacactacctgcaacaatcaggagcgcaatatgagttttctgttacccatccaattgttcaaaattcttgctgatgaaacccgtctgggcatcgttttactgctcagcgaactgggagagttatgcgtctgcgatctctgcactgctctcgaccagagccagcccaagatctcccgccacctggcattgctgcgtgaaagcgggctattgctggaccgcaagcaaggtaagtgggttcattaccgcttaagtccgcatattccagcatgggcggcgaaaattattgatgaggcctggcgatgtgaacaggaaaaggttcaggcgattgtccgcaacctggctcgacaaaactgttccggggacagtaagaacatttgcagttaaaaatttagctaaacacatatgaattttcagatgtgttttatccgggaggcattatgttactggcaggcgctatctttgtcctgaccatcgtattggttatctggcagccgaaaggtttaggcatcggctggagtgcaacgctcggcgcagtactggcgttagttacgggcgtggtccatccgggtgatattccggtggtgtggaatatcgtctggaacgcgacggctgcgtttatcgccgtcattatcatcagcctgctgctggatgagtccggcttttttgaatgggcggcgctgcacgtcagtcgctggggtaatggtcgtggtcgcttgctgtttacctggattgtcctgctcggtgctgccgttgccgccctgtttgccaatgatggcgcggcgcttattttgacaccgattgtcatcgccatgctgctggctttagggttcagtaaaggcactacgctggcgttcgtgatggcggccggattcattgccgataccgccagcctgccgcttattgtctccaacctggtgaatatcgtttccgctgatttctttggcctcggctttcgcgaatacgccagcgtgatggtgccggtggatatcgccgcgattgttgccacgctggtgatgttacatctctattttcgcaaagatattccgcagaactacgatatggcgctgctgaaatctcccgcagaagcgatcaaagatcctgctacgttcaaaactggctgggttgttttactgcttctgctggtgggatttttcgtcctggaaccgctcggcattccggtgagcgccattgcagctgtgggcgcgctgatattatttgtcgtcgctaaacgcggtcatgcgattaatacgggtaaagtcctgcgcggtgccccctggcagattgtcatcttcagcctcggcatgtatctggtggtttatggcctgcgcaatgccggattaacggaatatctttctggcgtactcaacgtgctggcggataacggcctgtgggccgcgacgctcggcaccggattcctcaccgccttcctctcttctattatgaacaatatgccgacggtactggttggcgcgttgtccattgatggcagcacggcatctggcgttatcaaagaagcgatggtttatgccaatgtgattggctgcgatttgggaccgaaaattaccccaattggtagcctggctacgctactctggctgcacgtacttagccagaagaatatgactatcagctggggatattacttccgtacagggattatcatgaccctgcctgtgctgtttgtgacgctggctgcgctggcgctacgtctctctttcactttgtaatgagatactgatatgagcaacattaccatttatcacaacccggcctgcggcacgagccgtaatacgctggagatgatccgcaacagcggcacagaaccgactattatccattatctggaaactccgccaacgcgcgatgaactggtcaaactcattgccgatatggggatttccgtacgcgcgctgctgcgtaaaaacgtcgaaccgtatgaggagctgggccttgcggaagataaatttactgacgatcggttaatcgactttatgcttcagcacccgattctgattaatcgcccgattgtggtgacgccgctgggaactcgcctgtgccgccctagtgaagtggtgctggaaattctgccagatgcgcaaaaaggcgcattctccaaggaagatggcgagaaagtggttgatgaagcgggtaagcgcctgaaataaagcggcgatatcccccccacaggttgttagaaaagtgcgctttatttatgtcggatgcgacgctggcgcgtcttatccgacctacaaagttatgaaaattcgatgaatagtatgttatttgtaggcctgacaggcgtagcgcatcaggcgattttgctatttacacagtactccctgcgtgagattccaattatcgcgtccagcatggtgtatcagtgagctgcttagttatcagcgatacagcgcagtagtttaaagacgtactggattatgatttatcagtggtttacacaacaaattattaaataattataagataccttaacccattttattattacacatctaaaacatcacaaaaaaaatcacttcacacactatcagagaacataataactttttaaaatgagcgcattttgatagttgttaacgatttcctttacgatactatcactaccctttttttacacacaaatattaccgggtggagataaaagggaaatcaaaggtaattatatcaggaagatataacgcattacatttattgtgtgtagaagaaaatccattcctgttctaattatccaatttaaacatcttagcataaaacaaatgatgaataaggaattttatattgattattagcactttataatcattgaataaaaatagattttatgtacttttaaaacaatgcactatattatggggtgatggatattcatgtcacgccccaaaattaactgagttcacctaaacagaaaggatataaacatcagacaggtttacgttactatcaggcatatcacctcagaatcagatgaaaactataaagaaatatctattatggttttaatatttgttgataaggatagtaacatgaacatgacaaaaggtgcactcatcctcagccttagttttttgcttgccgcatgtagtagtattccgcaaaatatcaaaggcaataaccaacctgatattcaaaaaagttttgttgctgttcataaccagccggggttatatgttggtcaacaagcgcgctttggtgggaaggttatcaacgttatcaatggcaaaacggatacgttgttagaaatctctgtattaccgttggatagctatgcgaagcctgatattgaagccaactatcagggccgactgctcgccagacaaagcggcttccttgatccagtgaactatcgtaatcactttgttaccatcctcggcaccattcagggtgaacaacctggctttatcaataaagtcccgtataacttcctggaagtgaatatgcagggcatccaggtgtggcatttgagagaagtggttaataccacctataacctgtgggattacggctatggtgcattctggccggaaccgggctggggtgcgccttactacaccaatgcggtgagtcaggtaacacctgagctggtcaaataacaccaccgaaagatgcagatgctttctcagcatctgcatcatgcattacatcaaattaatacacagtaagctaactattattattataagccctgtcctgttaattacctttggcaaactgattataaagttaatgtccgcaccaggagtcggttatgtttcttataattaccagggatacgatgttcttcaccgcgatgaaaaacattctgagtaaaggtaatgtcgttcatatacagaacgaagaagagatcgacgtaatgttgcatcagaatgccttcgtcattattgatacattaatgaataatgtatttcattctaattttctcactcaaattgaacgattaaaacctgtccatgtcattattttctccccctttaatattaaacgctgcctggggaaagtgccggtgacctttgttccgcggactatcactatcattgattttgtcgcactcatcaatggcagttactgctctgtgcctgaagcggctgtgagtcttagccgcaagcaacatcaggttctgagctgcattgcgaatcaaatgacaacggaagatattctggagaaactgaaaataagcctaaaaacgttctactgccataaacacaatatcatgatgatcctcaatcttaagcggatcaatgagctggtacgccatcagcatattgattatctggtgtgaatttcaggcttacggtgagtctggctacgctgccacacagattagctaatactaacgcctttcacccctgccataccttttaataatcgcaacaggtcttctatgctcgttgtggcatgaagctggatatcaatggcgaccacttcatgatcttcattttcctgcaagctaactaaatcagtttttattttttgctgcttaaaccagtcgagcatacttaccgtattaccgttcactaatgtcagctgtaaatggtaatttttgttcatcaggcggaaggttaattgatggaagacttccagcaccaacaaggtcatcacactaccataaatacccagttcgtacataccgctgccaataaccatacctatggcggcggtcacccagatatccgctgccgtcgtcagacctacaatattttggttacgaacgagaatgttacctgcaccgataaacccgacgcccgtcaccacctgagcagcaatacggctggggtcgagtccgacgtgatctaaagacagcacgtcagcaaaaccatatttgctaacaatcataaacagggcgcttcccatgccaattaatacatgtgtgcgtaaccctgctcctttgccgcgcatttgcctttccatgccaatagcgccacaggcaattgccgcgagtataagacgtataataaattctgctgtcatataaaaatgcaaaaaggagcagcaagatggctcaacttgctactcctttttacttgcacctcattaattcggcaagtcattagatgcttgatttttgaaggtatacaaatttttctgcgggtttttcttacagtattcgatcactttaggaatttgagtgagatcggtttcatttaaagtaacggtatcgccacctttatatactgtttcttcatgcagcatccaccatgcaaccggggtcattgcttttggattcagatcaataaattcctggcaggtcatatctttagcggattcattggctgccaacgcagattgtgcgttcaccagactcaaagccgctacagcgcccataaaaataaacgctttacggagagaactaatattcattttgtaacccattcaatatagagattatatatgaacaggaggaatagctgcttttaaagaagatattccggcctgttcaatatgcaaggaagtacgatgtaacgcattcccggaattacatatctttcttaattttgtcccattcgcctttaactttatctttaaagttggcttgtttatcctgagtacaagcctgaacgatagctggggttacggttgcaataccctgaacatctaaaaccgcatcttctggtttatctttgttgttcagcgcttcagcaaaaccaactgcagttggctggaaggattcgtccacagccaggaaatcttcacaggtccaggagttgaccggttttttgttatcagctgctttttgcgcatccgctgcattgctcacaactggcagaagaagcagaccaccaagaataacgcctaatacttttttcatcgtaatatcctcaactataaagtgaaagagccgtcacgaatcaatttcgacactgaggttataacctggttttctgtatatgtcatgttgatggaaaatatcaaaatcagatatttttatttcaatacaatgagttacagatgcatcagatactgcaattaggaaatttttattaaatcgactgcattcttagacgcgtttttggcatagattgatagcaggggattttcttcttaattttatagggtggttctatgttatatatagataaggcaacaattttgaagtttgatctggagatgcttaaaaaacatcgcagagcaatccagtttattgccgtgctgctgtttatcgtcgggttgctgtgtatcagtttcccgttcgtctctggcgatattttaagcacagtagtgggtgcattattaatctgcagcggtattgcgcttattgtcgggttattcagcaaccgcagtcataatttctggccggtattatccggtttcctcgtcgcagtcgcctatttattgatcggctatttcttcatccgcgcaccggagctgggcatttttgccattgcggcatttattgccggtttgttctgtgttgcaggggttattcgcctgatgagttggtatcgtcagcgtagtatgaaaggcagctggctacagctcgttattggtgtgctggatatcgtcattgcctggatattccttggtgcaacgccgatggtgtctgtaacgctggtttccacactggtgggaattgaactgatatttagcgccgccagcctgttcagcttcgccagtttgttcgttaagcagcaataattaccccggttgtcacccggatcatagtcacttgatgtgactatgatccgattaatactctctccgctacgcagtgttgtagatcaattgcgcactatcattgaaataattacctgctagtgattatttcaacctactgaatttcatctaatttttttcactctatggcaaattagccatttcaaacattatcatggctgatattttccgtagtcaggtttaatgttttaaaagtgctgtgggaaagtgaacaaagagttccgtaagcgttgatgctatgggcggttaaataagtaatccgggttcatttttttgcaactggcgttgattacattgcataaatatccgtgtctccagacgctatataaaaacctgaagacatgaatgcgttatttactcaggtaatttcaatgcgttaaaagaaagctggcaatccaattgccagcttaagtcgaaacaaggagactcgatatttaaatcggattacattttaactttagtaatattcttcagagatcacaaactggttattgataacttattcttgggcagtaatccgcaaacgttaactttttgtttgctatttacaagctgataacaaccaggaatcttacttaggatcaatatatggagtgcgtgatggataaatctgaagtattgattagtgttaatagacgtattagttcacgaagggtaaagttcttataggcgtttactatattgaacaacgattcggacaaggatgtaaataatgaaaaggatgacatattcgaaacgataacggctaaggagcaagttatgatttttctcatgacgaaagattcttttcttttacagggcttttggcagttgaaagataatcacgaaatgataaaaatcaattccctgagtgagatcaaaaaagtaggcaataaacccttcaaggttatcattgatacctatcacaatcatatccttgatgaagaagcgattaaatttctggagaaattagatgccgagagaattattgttttggcaccttatcacatcagtaaactaaaagctaaagcgcctatttattttgttagccgcaaagaaagtatcaaaaatcttcttgagattacttatggtaaacacttgccccataagaatagtcaattatgttttagtcataatcagttcaaaattatgcaactgattctgaaaaataaaaatgaaagcaatatcacgagcacgctcaatattagccaacaaacattaaagattcagaaattcaacattatgtacaagctgaaactaagacgtatgagcgacatcgtcaccctgggtatcacatcttatttttaatcaggacataagcaactgaaattgatggctggcatgacgagggatgcagatgctgatttcattacccccggtgattactaaaggagaggctaaaacgactttattcccctggtatgtgtatccaccagtagaacccttcgttgcccgaatgctggcaggaactgttggcagaacggcaacattttttttgtcgttgacctcaccatgtcgatcactgtgcctgtatcccaccttactggctgacaaccccactatgccgctggtctgtaaatccctcatatctctcctcgcgcgcaatttaaagaaccgttatttctcaagaattttcagggactaaaatgaacagaagaagaaagctgttaataccgttgttattctgcggcgcgatgctcaccgcctgcgatgacaaaagcgcggaaaacgccgccgccatgacgcctgaggtcggtgtcgtcacactctcccccggtagcgtcaatgtgttgagcgaattgcccggtagaaccgttccttatgaagttgccgagatacgtccccaggtgggcggtattatcattaaacgcaactttatcgaaggcgataaagtgaaccagggcgatagcctgtatcagattgatcctgcacctttacaggccgagctaaactccgccaaaggcagcctggcgaaagcgctctctaccgccagcaatgcccgcatcacctttaaccgccaggcaagcttgctgaagaccaactacgttagccgtcaggattacgacaccgcgcgcacccagttgaatgaagcagaagccaatgtcaccgtcgccaaagcggctgttgaacaggcgacgatcaatctgcaatacgcgaatgtcaccagcccgattacgggcgtcagcgggaaaagcagcgtgaccgtcggcgcactcgttaccgctaatcaggcagatagcctggttaccgtacaacgtctggacccgatttatgtcgatctcacgcagagcgtgcaagatttcttacgcatgaaagaagaggtcgccagtgggcaaatcaaacaggttcagggcagtacgccagtacagctcaatctggaaaatggtaaacgctacagccagaccggcacgctgaaattctccgacccgacagtggatgaaaccacgggctccgtgacgttacgggcgattttccccaacccaaatggtgacttgctgcctggcatgtacgtcacggcattagtggatgaaggtagccgccagaatgtattactggtgccgcaggaaggcgtcacccacaacgcccagggtaaagcaacggcgctcattctggataaagacgatgtcgtgcagctacgcgaaattgaagccagcaaagccatcggcgaccagtgggtcgtcacctctggcttgcaggctggcgatcgggtgatcgtttccggtttgcaacgcattcgtccgggtatcaaagcacgagcaatttcctccagccaggaaaacgccagcaccgaaagcaaacaataacgttgcaggcttaaggggactttcatggctaactattttattgatcgcccggtttttgcctgggtacttgccattattatgatgcttgcaggtggtctggcgatcatgaacttaccggttgcgcagtatccgcagattgcgccaccgaccattaccgtcagcgctacctatccaggtgccgatgcgcaaacggtagaagacagcgtcactcaggtgattgagcaaaatatgaatgggcttgatggcctgatgtacatgtctagtaccagtgatgcggcgggcaatgcctctatcactctgaccttcgagactgggacatctcctgatatcgcacaggttcaagtgcaaaataaactgcaactcgctatgcctagtttacctgaagcagtgcagcagcaggggattagcgtcgataagagcagcagtaatatcctgatggtagcggcgtttatttctgataacggcagcctcaaccagtacgatatcgcggactatgtagcgtctaatatcaaagacccgctaagccgtaccgcgggcgttggtagcgtacaactctttggttccgagtatgccatgcgtatctggctggacccgcaaaaactcaataaatataacctggtaccttccgatgttatttcccagattaaggtgcaaaacaaccagatttccggtggtcaactgggtggcatgccacaggcggcagaccagcagctaaacgccagcatcattgtgcagacgcgtctgcaaacgccggaagaatttggcaaaatcctgttgaaagttcagcaagatggtagccaagtgctgctgcgtgatgtcgctcgcgtcgaacttggggcggaagattattccaccgtggcacgctataacggcaaacctgctgccgggatcgccatcaaactggctgccggagcaaacgccctggataccagccgggcagtcaaagaggaactgaaccgcttaagtgcctatttcccggcaagtctgaagacggtttatccttacgacaccacgccgtttatcgaaatttctattcaggaagttttcaaaacactggttgaggctatcatcctagtcttcctggtcatgtatctgtttttgcagaatttccgtgccacaatcatcccgacgattgccgtaccggtggttattctcgggacgtttgcgatcttgagcgcggtcggtttcaccatcaacacgttgactatgttcgggatggtgctggcgatagggttactggtggatgacgccatcgtggtggtggagaacgtcgagcgtgtcattgcggaagataagctaccgccgaaggaagcgacgcataaaagcatggggcagatccaacgtgcgctggtcggtattgccgttgttctttccgcagtgtttatgccgatggcctttatgagcggtgcaaccggggagatctaccgccagttctccatcacgctgatctcctccatgctgcttagtgtatttgtggcaatgagcctgacccctgccctgtgcgccaccattctgaaagccgcgccggaaggcggtcacaaacctaacgccctgttcgcacgcttcaacacgctgtttgaaaaaagtactcaacactataccgatagcacccgcagcctgttgcgttgtaccggtcgctacatggtggtctacctgctgatttgcgccgggatggcggtgctgttcctgcgcacgccgacctctttcttaccagaagaggatcagggggtatttatgaccaccgcgcagttaccttccggtgccaccatggttaacaccacgaaagtgctgcaacaggtgacggattattatctgactaaagagaaagataatgtccagagcgtgtttaccgttggcggctttggcttcagcggtcaggggcaaaacaacggcctggcgtttatcagtctcaagccgtggtctgaacgtgtcggtgaggaaaacagcgttaccgcgatcattcagcgggcaatgattgcgttaagcagtatcaataaagccgtcgtcttcccgttcaacttacccgcggtggctgaactgggtaccgcgagtggttttgatatggaactgctggacaacggtaacctggggcacgaaaaactaacccaggcgcgaaacgagctgttaagtctggcagcgcaaagtccgaatcaggtcaccggggtacgcccgaacggcctggaagatacgccgatgttcaaagtgaacgtcaacgctgcgaaagctgaagcgatgggcgtggcgctgtctgatatcaaccagacaatttccaccgccttcggcagcagctacgtgaacgacttcctcaaccaggggcgggtgaaaaaagtgtatgtccaggcaggcacgccgttccgtatgttgccggataacatcaaccaatggtatgtacgcaacgcctctggcacgatggcaccgctttctgcctacagctctaccgaatggacctatggtagtccgcgactggaacgctacaacggcatcccgagtatggagattttaggtgaagcggcggccgggaaaagtaccggtgacgccatgaaatttatggcagacctggtcgctaaacttccggcaggcgtcggctacagttggaccggactaagctatcaggaagcgttatccagtaatcaggctcctgcgctgtatgcgattagtctggtcgtggtgttcctcgccctcgccgcactctatgagagctggagtattccgttcagcgtgatgttggttgttccgttaggcgtcgttggcgcattactggccaccgatctgcgcggcttaagtaatgacgtctacttccaggttggtttgctgaccaccatcgggctttccgccaaaaacgccatcctgattgtcgaatttgccgttgagatgatgcagaaagaagggaaaacgccgatagaggcaatcatcgaagcggcgcggatgcgtttacgcccaatcctgatgacctctctggcctttattctcggcgtgctgccgctggttatcagtcatggtgccggttctggcgcgcaaaacgcggtaggtaccggcgtgatgggcgggatgtttgccgcaacagtgctggcaatttacttcgttccggtctttttcgttgtagtggaacatctctttgcccgctttaaaaaagcgtaacgtgtaaatgagagtaaggttgaacatgaaggttcagccttactctttcctgctaaccattcaccactcaacaaccagctaaccgtcaggaataccaggcttagtacacagcactgaaagtagaaaccactccagccattcgtcatcaatttgaacaacacaatactgacccacattcccgtaatcgtatgaattgtcagcttaataatcccaaacatgccgagtcttttcctcctgaaaataccgataccgcctggcaaactgcgaaagagaactagccggtagcccggcagaaatcatcagggaagagtttcacatgaagcaggtgtgagatcctgaccaatattcaaatgcgaaatatgtcaggaaaaggtacctgggctatgttgcgcaaactgatgtggcgttacaccataatattgtcgaaatgtgtttataaagtagcttgtactgctatagccacatttttccgcaatagtatgcagaggaatttgacgtaactcgagtaatcgtctggccatgctcatcctggaggcgagtaatattttactgaaacaggtattttcatcctgcaacttttttttgattagactctcgctggtatacattctttccgcgatatcgcgcagataccaacgtttggcgatatcaaagctaataaggcgttcaacttttccactaacagtgctgatgctattgaaaagtaaggggatcagttctttcttatgagaaaacatgcttaaacaggaaaggtagagcatattgctcagtatcggactatttaccccggattcattgaagctatcaaaaatcgccgtcaccagcggcatggggggactctggttaattaacaaacggtctttgctgtgtaaccctaaattgcgtggtagctgacgaatattttgtaagtaatggcaaactgtcagctcatcgatatccagtcgtcgcgtatccggactacaaaacgcaaaatcgtctgccaaatttttctccagcagcagaatactctcgttatgcaggcttattttttgctgttcatgataaatatcgaaactacgacgaatgaggatcacgctgcagacatgagtcatgattatcccttatatttcatactgcgattatttcaatttcagtatactaatgaaatgatgccagactgtttcttagcgcaaaaactgccagatttggtaggaccaaaatttatccacaaagtagttttgcataacagttaattgataataagtaaatgcagcacgaatatattttcgcacagcgtatagcttatgtttataaaaaaatggctgatcttatttccagtaaaagttatatttaacttactgagagcacaaagtttcccgtgccaacagggagtgttataacggtttattagtctggagacggcagactatcctcttcccggtcccctatgccgggttttttttatgtctgagtaaaactttataatcttattccttccgcagaacggtcagtgccgtaaaaattcccttgcgcaacaatacttgccgcgctgtcacggttgctcaatctctgcgcgcttcgctcctgatactctgtgggcgtcatcccataataatttcgaaagacgtaaatgaaatagctcacgctgtgatatccacaggatactgcaactcgcttaatactaaaaccatgtataacaataagttgcaaagcacgttgcattctacactcagtaagcaactgactataacttgtctcttcttcgcgcaattttttctttaacagacttggactcatcaacagctcgctggcgattcgggctagtgtccactcatgggcgatattattattgataaccgtacaaactcgtgttcgcatgttcggttgtaaaacgttcagaagcagcggtataaagtgctcatcctcaagaaaaacagataacaacgcaaagattaatgctcttttacgtagcatttctgcatagcgaagattcttattctggcttagttgcgcaacttcctgaaaaacaggaatatctctactacagtgatgaacgagtaaactagaaacttttttatgtgcatgaagatttaatgcctcctccttgagcatcgggagaaataaactaagcgtgtccctactcacgaatacaaaattttcaacacacttatctactcgaatttggcttgcatccgcaaaaaccaggtcaccgccattaaaatagcgatattcaccattaaccatggtgagaatatatttatgtcttgcatacgcaattagacaattcccatgtagactttgcatagttgacttaatattacataaacatattactgtttattaatgtagcacgccgccctcttaagtcaaattgattgataaataaatttaaacgaagcgggagaacaggatgataatgtgtgatgttctacgggcaggatgactggatttataatacaaaaacgtgtttaagaacacagggaaattaatagtaagcaaataatcccttttcgtgacattaaaggtaatcgctacatttaataaacattcatataacatatatcttatcaacacgatgaatagacagccaatatattattgcgattaataagcaaccgaatgcccagctgtttttttaaaggctgggcattcggtttttacaacgttatgttatcaggtgtgtttaaagctgttctgctgggcaataccctgcagtttcgggtgatcgctgagatatttcagggaggctttgtagtcttccagcaacagttcagcaaagtccatttcgaagccgcgacgacacataatgcgcatcaccacgatgtcggtggcttcaccgccgagagtgaaggccggaacctgccagccgcgcagacgcagacgttcagagaggtcgtacagggtgtatcccggatcttcaccatctttcagtttgaagcaaaccgccgggatgccttcgtccgggcgacccgtacagatgaactcatacggccccagtttggcgatttcatccgccagataagcggcaacctggtaagaggcgttctgtactttggtatagccttcacgaccgaggcgcaggaattcatagtactgtgcaattacctgacccgccgggcgggagaagttgatggcaaaagtaccaatttgaccacccaggtagtcaacgttgaacaccagttcctgcggcagcgcttcttcgtcacgccagataacccagccgcagcccagcggagccagaccgaatttatggccactagcactgatgcttttcacacgcggcaggcggaagtcccagacgatatccggggcgacgaacggtgccaggaagccaccgctggcagcgtcgatgtgcatgtcgatgtcgataccggtgtcggcctggaatttatccagcgcatcgtgcagcggttgtgggaactcatagttaccggtgtaggtcacgccgaaagtcggcaccacgccgatggtgttttcgtcacaggcttcaatcatgcgtttcgggtccataaacaactgaccggggcgcatagggatctcacgcagctccacatcccagtagcgggcgaatttatgccagcagatttgtaccggaccgcacaccaggtttggtttatccgttggtttgcctgcagcttccatacgcttgcgccaacgccatttcatcgccatcccgccgagcatacaggcctcggaagaaccaatggtgttggtgccaacggcctgaccatttttcggcgcaggcgcatgccacagatcggcaaccatatttacgcaacgcaggtcgatggctgcggattgcggatattcttctttgtcgatccagtttttattgatgctcaaatccatcaatttatggacgttttcgtcgtcccaggtctggcagaaagtggccaggttctgacgagcgttgccatcaagatataattcatcattgataatctgaaatgcgacatcatcgcgcatttcgtgcagcggaaatcgtttactctccgcgatagtagaaatggcctttgcgccaaaacgactatcgagtagttcactgcggaaatccgttaacagcttctggtccatttcgaactccttaaatttatttgaaggcaataaaaaagtaggatttatccgcaatggaagcaaggcattacaggcttaatttaaataacaaaatcctaagcagaaaaacgactttttataatataaacatttaacatgataatattaaaaacagactttattatcgtaataaaaatcgcccaaacattgctgttcgggcgatcaaattaattattgtttatcctgcatatacggcgtgtacaccccgttcagactgtgcaggaaagctacgatatcatccacatcctcctgcggcagctctttgcctacctgatagcgcagcatcagtttcaccgccccgtccagcgtcggcacgtcaccgcgatggaagtacggtgccgttaaagcaacgttacgtaaaccgggtactttctgacgcaatttatcacgctcttctttagtcacattcatacgaccaatatccgccgccgtaatttccccaaagttaaagtcttttttcagccccaacggttcaaaggaacgtccgccgagaataataccaccatgacaagttgcacatttattatctttaaataattgatagccttttttctgttgcgccgtcagcgcattttcatctccgcgcaaccatttatcaaatggggaatccggcgtaattaatgttttctcaaattcagcaatggcatcagtaatattttcgccactgaaaccttgcggatagacttcgaggaactgcgttttaagctgcggatctttttccagcttagcaataatttcgtcccaggatttgctcgccatttcaatcgggttcaacggcggtccaccagcctgatcctgcaatgttgccgcacgaccatcccagaactgctcaacgttaaatacactgttaaataccgtcggcgcgttaatcggcccaactgcgccaccaacaccaatgcttgtttttctgccatcgacgccccccgcattcaacgcatggcaatgagcgcaactaatggtgctatcagcgcttaaacggggatcgtgatacagcgcaaaacccaacgccactttttgcgcatcggtaggcagtttttgcgggatgggctgcaccggttcattgcgatgttccggagcagtatcattgctggcgtaatattccgcgcgctgttttgcaatccaggccagtatttccgcccgctcttcatcactcaccttacccgcccagtgtagcgcggtataacgcgttggtggcatagtttcatactgcatcacccattcaatcttattcaaatcgctttggctaacgggtttatcagccagcagtgccgcacgcacggcctcaaggttaaaagatttatatccaagcttaatgtcgtaatccatcaactgtttcgcgccaggaatataataataggcgggtaattctgcgctaggcgtgtggcaatagtcgcatcctttttcgcggagaaagcctaaaaccttattattttcactgacagcagatgcctgaacatcggcctgtttactgcgtttattatcgtggtaccacacataaccagataaccctaaatagcaaatcgcgacgccagccaggccgatcgcggtaatacgactgaccattttcattattcttccctcacggtggtgagttattgtgacccagaaaattttccagaatgctgcaaacgtctctgcgagacaaagccatcataaaaaacagggagatacgctttttgataggaatcaatcaattacatgaatataaactatcaataagatagcctgtgcctattacccagatcaggaatggcatatcatgattgcggcgagagcaggattgaatgttctgaaaatgaaaaacaacaccaaatcggtatttttataaattccattgatattagtgcgttatattttttgacaggttaataaacgtgatccaccgcacgctttgtcgcccaccaggcggagcgaatgactacccttaaagaaaagccgataattagcgacgaatttcggaggttggatccttatgctcaatcagaaaattcaaaaccctaatccagacgaactgatgatcgaagtcgatctctgctatgagctggacccgtatgaattaaaactggatgagatgatcgaggcagaaccggaacccgagatgattgaagggctgcctgcctctgatgcgctgacgcctgccgatcgctatctcgaactgttcgagcatgttcagagcgcgaaaattttccccgacagtaaaacctttcccgactgcgcacctaaaatggacccgctggatatcttaatccgctaccgtaaagtgcgccgtcatcgtgattttgacttgcgcaagtttgttgaaaaccacttctggctgccggaggtctactccagcgagtatgtaagcgacccgcaaaattccctgaaagagcatatcgaccagctgtggccggtgctaacccgcgaaccacaggatcacattccgtggtcttctctgctggcgctgccgcagagttatattgtcccgggcggccgttttagcgaaacctactattgggattcctatttcaccatgctggggctggcggaaagtggtcgggaagatttgctgaaatgcatggccgataacttcgcctggatgatcgaaaactacggtcacatccccaacggcaaccgcacctattatttgagccgcagccaaccaccggtttttgcgctgatggtggagttgtttgaagaagatggtgtacgcggtgcgcgccgctatctcgaccaccttaaaatggaatatgccttctggatggacggtgcagaaagcttaatccctaatcaggcctatcgccatgttgtgcggatgccggacggaagcctgctcaaccgttactgggacgatcgcgacacgccgcgtgacgaatcctggcttgaggacgttgaaaccgcgaaacattctggtcgcccgcccaacgaggtgtaccgcgatttacgcgcgggggcggcctccggttgggattactcttcccgttggctgcgtgatactggtcgtctggcgagcattcgtaccacccagttcatccccatcgatctgaatgccttcctgtttaaactggagagcgccatcgccaacatcagcgcgctgaaaggcgagaaagagacagaagcactgttccgccagaaagccagtgcccgtcgcgatgcggtaaaccgttacctctgggatgatgaaaacggcatctaccgcgattacgactggcgacgcgaacaactggcgctgttttccgctgccgccattgtgccactctatgtcggtatggcgaaccatgaacaggccgatcgtctggcaaacgccgtgcgcagtcggttactgacacctggcgggattctggcaagcgagtacgaaaccggtgaacagtgggataaacccaacggctgggcaccgttacaatggatggcgattcagggatttaaaatgtacggcgatgaccttctgggtgatgaaatcgcgcgaagctggctgaagacggtgaatcagttctatctggaacagcacaaactgatcgaaaaataccatattgccgatggtgttccccgcgaaggcggcggtggcgagtatccgttgcaggatgggtttggctggactaacggtgtggtacgccgtttaattggtttgtacggcgaaccataatatttttacagccagccgctaacttcctgctggctgtaaaattatcctcttcaggaggagatatttaacatcattgccgcctgggtgcgatttttcacttccagacggcgatacagggattccagatgcgcttttaccgttccggtactgatattcagcgctctgccgatctccttattactttcgcccgccgctaacatggttaaaatctcccgctggcgggcgcttaagcttttgagatctttaatgtccttttccggcgtcgtccgccagtctccaggcagaaacatcatccccatcgccgcactatttaccgccaacgcaaatgtctcgacggtactatcacgaggcacaatggccagcacattaaaatggataacttcctgtaaccaccgtttattgcaatccgtcgccgtaattaacaccttaacctcaggaaattgcaccacggttttttgcagcaaccagtagcaaaactcaccatcctgatcgccatcgagcataactaaggcttcagggtaactttccagcttttgccataactcgtctgcctgactggccccctgaatactcactcctggaatacgctgctgtaaactgattttcattccatgaataaatatactctgcctgtcaaacatgactatttgcataactgaatctccacctgaatacgttaaaaagacttaagtagtggaagggtattacccgcgagaaaaaataagaattcgccatttggcggtggccattctacagagatgacgtgtagaaaatagttaccgatataaatagttacagctaaacgcctgaaattacatgtcgagggcactatttaaaacaattttgaggatttccttatattggtggttagtacgcatgcaattaaaaatgaaattccgcgaccacaagccaaaataacaaacggcaaggagacaaaaataagcacaaatagccaacacgtcctctgttcactttaaagggaatcgctgaaaaatacgctctgtttaaggggattcacctttctcagaaagctattccgcccttttcctgctgagaaatcgccacattcggcatgacaacattgtgaaacccggcattagatgttagaaaaaacaataaacaatgcgatatgcgcgttactgtttcgctgtgaacaacaaagcgtcaaagaaatggataaaattcacgcaatgcagttgttcatcaaagtcgcggagctggaaagtttttcccgcgcagcggatttctttgctttgccaaagggaagtgttagccgccagatacaggcactggaacatcaacttggcacccagcttctccagcgcaccacgcgacgggtcaaactcacgccagaaggcatgacctattatcaacgagcaaaagatgtgttgagtaatctcagcgaactggacggtctgtttcaacaggatgccaccagtatcagcggtaaattacgcatcgacatcccgccaggaatcgcgaaaagcctgttactgccgcgcctgagcgaatttctctatctgcatccgggaattgagctggaactgagtagccatgaccgtccggtagatattcttcatgatggttttgattgcgtgatacgcactggcgcgttaccggaagatggcgttatcgcccgtcccctcggcaaactgaccatggtcaactgtgccagtccgcactatctgacgcgctttggttatccgcaaagccccgatgatctgactagtcacgcaatagtgcgttatacaccgcacctgggtgtacatccgttaggttttgaggttgccagcgttaatggcgtccagtggtttaagtctggcggcatgttgacggtaaacagtagcgaaaactatctcaccgccggtcttgccggtctggggattattcagatcccgcgcattgccgtgcgcgaagccctgcgtgccgggcggcttattgaagtattacctggctaccgtgccgagccgctctcccttagcctggtttatccgcagcgtcgggagctttcccggcgtgtaaacctgtttatgcagtggctggctggcgtaatgaaagagtacctggactgaccgactatactttttaagaatgaccacgacagaaggacaaaagagcggatgacgcaggaaaacgagatcaaacgtcccatccaggatctggagcacgagccgattaagccgttggataatagcgagaaaggcagcaaagttagccaggcgctggaaaccgtcaccaccactgccgaaaaagtccaacgccaaccggttattgcgcacctgattcgcgcgacagaacgctttaacgatcggctgggtaaccagtttggtgcggctatcacctatttcagttttttgagcatgataccaattttgatggtgagctttgccgcagggggctttgtgctggcctcccatccgatgttgctacaggatatcttcgacaaaattctgcaaaacatcagcgatccgacgctagccgccacgttgaaaaacaccatcaacaccgccgttcagcagcgtacgactgtagggcttgtcggcctggcggtggcactttattccggcatcaactggatgggtaacctgcgtgaagcgattcgtgcccagagccgcgatgtctgggaacgcagcccgcaagatcaggagaagttctgggtaaaatatctgcgagattttattagcctgattggtttgttgattgcgctgattgtgacgcttagcatcaccagcgttgccggtagcgcgcagcaaatgattattagcgccctgcacctgaacagcattgagtggctgaaaccgacgtggcgattgattggcctggcgatttccatcttcgccaactatctgcttttcttctggatcttctggcggttgccgcgccaccgtccgcgcaaaaaagccctgattcgcggaacatttctggctgctattggttttgaagtgattaaaatcgtgatgacctacaccctgccaagcttgatgaaatccccctctggcgcagcatttggttccgtgctggggctgatggcatttttctacttcttcgcccgtttgacgctgttttgcgcggcgtggattgccaccgccgaatataaagacgacccgcgaatgccggggaaaacgcagccttaaaataggccggatgcggcgtaaacgccttatccggcatacgattttattcggcctggctccccgtaggccggataagatgcgccagcatcgcatccggctataatgcgcacataacctcttgaaactcgtccccagagcctcttcagccatctatttgggagcaaacaatttcattccaactcataaccccagcatataaatccagttggtaacttttatttaacctgaaaccagttttatccactatttataaaattatgtgaagcatttcatagaagaaaaatcactggcctaaacattatcccctttttgcctgatttttgaccatttccgcgatttgttacacattgaaatatcacttttgctgtgcgtaatatggctattcgttagccaaaaaataagaaaagattatgcaagcaacagccacaacactcgaccacgagcaagaatacacgccgatcaacagccgtaataaagtccttgtcgcctctctcattggcacagccattgagttcttcgacttttacatttacgccactgcggccgttattgtgtttccgcatatcttcttcccgcagggcgatcctacggcagcaacgctacagagcctcgccaccttcgccatcgccttcgtcgcgcgccccattggctctgccgtttttggtcattttggcgatcgcgttgggcgtaaagcgacgctggtcgccagcttgctaacgatggggattagcaccgtggtgattggtctgctgccgggctatgccacgattggtattttcgccccgctgctgctggcgctggctcgatttggtcagggtctgggcttaggcggtgaatggggcggcgcggcgctgctggcgactgaaaacgccccaccgcgcaaacgtgcactgtatggctcctttccgcagctgggcgcaccgattggcttcttctttgccaatggcactttcttgctgctttcctggctactgaccgacgagcagtttatgagctggggctggcgtgtgccatttatcttcagcgcggtgctggtcattatcggcctgtatgttcgcgtgagcctgcatgagagcccggtgtttgagaaagtcgctaaagcgaaaaaacaggtgaagatcccgctgggtacgctgctgaccaaacatgttcgcgtaaccgtactgggtacgttcattatgctggcaacctatacgctgttttacatcatgacggtctactctatgacctttagtaccgccgccgcgccagttgggcttggcctgccgcgtaacgaagtgttgtggatgttgatgatggcagttattggttttggcgtgatggtgccagtcgctggattactggctgatgcctttggtcgccgtaaaagcatggtaatcatcaccacgctgatcatcctgttcgcgctgttcgcctttaacccactgctcggttctggcaacccgattctggtttttgccttcctgctgctggggttaagtctgatgggtctgaccttcgggccaatgggtgcgctgttaccagagctgtttccgacagaagtgcgttacaccggagcaagcttctcttacaacgtagcgagcattctcggggcttccgttgcgccatatatcgcagcctggttgcagactaactacgggctaggtgcggtggggttatatctggcggcgatggctggcttgacgttaatcgccctgctgctgacccatgagacgcgacatcagagcttgtaataagagtgaaaagcctgatgcgctacgcttatcaggcctgaatttccatacaatatattgaattcgcaaggatttgtaggccggataaggcgttcacgccgcatccggcatgaacaaagcacactttgccaacaatctaaatctgtttaattgccggatgtcagacatccggcaattatcatcacttcttcatctggctcaaaatcgtccgacactgattagcctccccttcggaaggactgatcagtgccagtaacgccgccgccggtgttaccagcgttgccagtgccgcagcaacagcaccacgggcaatcagcggtccggctttcaccccagcctgcggatttttaaacgtcccccgcacatacagcgggctacgcagtgtgataatccgaattcctttactctccggatcaatagtcaaatccagctgttcgctagcaaaacttgccgtgccggtaacattaatcaacgcgttctcagtatcgaaagcaaaaatctgcgggcgcgccacgccgttggcaatattcagattcgccgccgcgcagttcacccgcacctcatcatcaccaaatatcgcaccgacaatgtagttgccgacattcagcccaacaatctccatcaggttgcggctcaccagcccgtcattcatcaacagtttcaggttgccgttactgttgcctaaaagtgccgccacgctgttaccgctaccgcgtagttccgcgtcaccgttcatttcccccagcgtcttctgcatcagttccacatcgggcatcagttctttcagtttcagtcgacgagcctgaatatctgcccgcccctgcatcggctttttatcgccttccagatgaatattcgccgcaatgctgccgcccgccatgccaaatttcagcggttgcaggcgcaggtcagcatttttgaggatgatatgagtagaaagatcgctaatcggcaggctactgccatgctcaatgcgccgccctttgaagcgaacatcggcatccataacgtcccatttatcggtttcgaagcggtcataaggcagcactttgcccgcaggctgaacgcttttttcgcccttcttctgttcagaccgtttgctcttttctgcccctttcccggaatcaacgccaatcaacggtcccaggtccgccagccgcaattgccggctctcgacatcaccttccagttttggtcgtggctttccggtggtgtagaccagagaaccgtggatatcgctatcaccaattcgcccattaaaaccgcgataatcaaagacgctgcttttttcagtgtcgattttcgctaccagccgaccatccgtttcaaacggcggggtatcgggcagcagaacgcccgtcagttcatagagatcacccagactatcgccagaaaatttaagccgtaaatcgacaccgcccatcttcattgggtcattcacgacgccatcaaaagcaacacgggtgttaccagagcggaaatcagcctgtaccggaaacggcgtcccttcgccacgcagcgccagcataccgcctatttttcccgtacccgtgagcggttcaccgttatatcgtccctgcgccttcaggccaaaaacgtaatcgcccaccttttctttatccgctttacctttgcttccagtaacttcgctgaacggcagcggcttgcctaagggatcaacaaaaatctccagatccgctttgcttactttgtcatcaatggcgatccgcccttgatcgaaaagaatattatccagccgaaagctccatgcgctcggctttgcattcgcgtctttgttatcatcgttggcaagattaaacgtccagttattgttcttttcagagaggcgaatcaggcgcgcgtcgggcttttcgagcttgatccacggcagccagaccgttttggtcagcagcgccagcggggccagcgttgcctctacgcgtggcaaatgcaccatcgtgacttcgggaatatccggtggattgccaagaatgatgtcttccgcgtgtacatggggccacggcacccagctgcgccagccagtttcttgtttttgccgctcccacaccacgcccagatcgccacggatagcgaacggacgattcaactccgcagagactttctggttgatagtcggtttgagtcgattccagtcaaaagttgcaatcaaaatgatcgccacgacaatcaacaacaagaaagccccactaatcgcagcggttattttgcctgccttgctcatcgttcgcttcctcatattcttcctgtgccagtcctaaagatagtccagccaggcggaaaatgaggcagcttatagcgccagaaccgccgtattcagcgtttctatcggtgccgggcgactaagaaaccagccttgtgcggcgaatgcggggctgttctgaacatcacgccactcttccggcgtttctacgccctcgacaatcaccccgcgacaatagcgattcattagatgtaaaagctgagaaaagagtgtgcgtccttccgggctctgacgcagcatcacaaacagttctcgcgcgattttgatgtagtcataacgcacttcacttagcgcagagaaatttgccatcccggtaccaaaatcatccagccacagcgggccaaattcacacatgctggcaaaggtactatctttcggcagacggatatgctccaccagttcgaaacgcagccagggaagacgctcaatctggcgcaggatttttggttgctgacgcagggcgatgagcgtagggccatcaatattgacgcttgccagcaggccgtgctctataaagaagtcggctttttgcgccagcaaatcaatctgctctttcacaacctccatccgatggctgacggtgatttcagtaaaatagcgatccggcggcaggcgttggctagggttcaagggatgcgtgaccaccgttaatagctccacggccattaaccgcccgcatgtttgatagatcggctgccaggtgtaagcacgctcacactgcaaccaaaaacgccgttcctgcaagctctcgatgcttgcttcagggttgcttattcgctggataacctgccttatcatcaaagatgtcctgtgtttaaaagtgatgctgcccggactcgacaaagattatcggcgcgtaagggcagaactttaccgcctggccggggtaaatttcctcactccacaacggaatctttcaggaatacgttctggctcaaaaaaataatggaacactgttttaatatggttgaccagcaaaccaccacagcgcaaactaacgctaattttttacagatcaggttcacgactatgtccaaaaagattgccgtgattggcgaatgcatgattgagctttccgagaaaggcgcggacgttaagcgcggtttcggcggcgataccctgaacacttccgtctatatcgcccgtcaggtcgatcctgcggcattaaccgttcattacgtaacggcgctgggaacggacagttttagccagcagatgctggacgcctggcacggcgagaacgttgatacttccctgacccaacggatggaaaaccgtctgccgggcctttactacattgaaaccgacagcaccggcgagcgtacgttctactactggcggaacgaagccgccgccaaattctggctggagagtgagcagtctgcggcgatttgcgaagagctggcgaatttcgattatctctacctgagcgggattagcctggcgatcttaagcccgaccagccgcgaaaagctgctttccctgctgcgcgaatgccgcgccaacggcggaaaagtgattttcgacaataactatcgtccgcgcctgtgggccagcaaagaagagacacagcaggtgtaccaacaaatgctggaatgcacggatatcgccttcctgacgctggacgacgaagacgcgctgtggggtcaacagccggtggaagacgtcattgcgcgcacccataacgcgggcgtgaaagaagtggtggtgaaacgcggggcggattcttgcctggtgtccattgctggcgaagggttagtggatgttccggcggtgaaactgccgaaagaaaaagtgatcgataccaccgcagctggcgactctttcagtgccggttatctggcggtacgtctgacaggcggcagcgcggaagccgcggcgaaacgtgggcacctgaccgcaagtaccgttattcagtatcgcggcgcgattatcccgcgtgaggcgatgccagcgtaaacgcagcatatgcaaaaggctggataaagtgttacccctctatccagctcatccataaatacctgatggttgtgctaactcatcaccatcaggcattactgtgcaggtggaatatccgtcacttcaggatgtacgtcatccgtggcgacagaggtggtcgcagcggcggtagatggggccatgatttgatcccagaccgcctgcaacgctttcatgttaaattccggctcgcctttcggctgcagcagtattaacgccatatcattgctcaactgttgacgcagatcctgatttaacatctctaccgtcaggctattaaggaaatcctgccgcagtttctgatattgctccggcgcgatatcgacaacctgattttgcaagctacgcatccgctgacccatcagaatatcggtatcagctcgtgcataggcggcaaacagtttctgcagctccagtttcttttgcgccactaacgcattgaactcttcttccggcagacctttatcgcgaaccttcgccagttcacgcgccaccagattaaggttgctgttcagcttgtcgtttggactttcgatgttgatggcacactgcgcacgcagatacagcacacggcagtcaaatccaagaccgatgtctttgctgttactggcacttaacgcttgctgaacatgccagaacagcgcctcgcgggccaggtccgcacgccagtagcgcagcagtgcggcactttcacgaatcggctgccacggcgtatcccacatgatagataaccggtcctgacgcaccgcgtcagtcataatactcaccgcttccgcacgcagcggagaaagcgtcggcaccggagctggcgtttcacgtttgcctttcagttcgccaaacgttttgtttatttggtcgacaacgctgcgcgcatccacgtttcccaccaccagtagcgtcattgcatccggggtgtaccatttctgatagaaatctttaattttttccgcttcaacgggttgtttcagcggatcggcaggatcgtgacctaacaaggtactccctttcagacgatagcgccaccagccctctttagtatcggcaggccaggttgccaccatgtcctgactttgcagcgcgtggttgatggtttctggtgtgatggtcaatttgccagtggcatttgccagataagagagcgcttctttcagcaaatcgttacggttattgggcaaactcagattaaacagcgtggtgtcataagagacaattaccggcggcatcgggcgtttagggtcgatcccctgctgccacaaactacgcgcctgtgctgcgtcaaggccaccgctttgcgttagcgcaatacgagggatggcgtgactgtaaccgctctgttgtgtactttcggcgaggctaccggtattaaccagcaggcgaatttcaacacgatcgctgggacgctggggggtggtcagcacttgccactgtaaaccgttggaaagcgtcccctgttgccatgctggatcaggctggagcgcatctgcctgcacatagccagcagtggccatcatcagcaaaccgcccgctaaaagtcgaatttttgtgccctgcatgtgaacccctgatcaactatcctggtaataaaaaaactgcccgttgtcggtcagtctaaatgacgttaaaaacacttcgtgttagaccgcaagaacatgaaaatgtcacggaagaagtgaaataaacctgaactcacccaggtggtaagttcaggcacaggggtcaattatgcgcaaacacccgcactcggggaagggagtgcgggcataagtgatgagattaagaggataattcgtgcgttttgccatccggcgcacgattattcagcacatcgtccagttttttgtggtccagttctttcacccacttagcaacgacaatggtcgctacgccgttaccgaccaggttagtcagcgcacgagcttcactcataaagcggtcgataccgaggatcagcgccagacccgctaccggcaaatggcccaccgcagagagcgtcgccgccagcacgataaagccactacccgttacccctgccgcccctttagaagaaagcagcaacacgattaacagcgtgatttggtggacgatatccatctgactgttagtggcctgggcgataaacaccgccgccattgtcaggtatatgcttgtgccatcaaggttaaagctgtagcctgtcgggatgaccagccccaccacgcttttacggcagccgagtttctccatcttgtcgagcatacgcggcagcgcgctctcggaagaactagtccccagtacaatcagcagttcttcacggatgtagcggataaatttgaagatactgaaaccagtcgctttagcgatactacccaataccagcaccacaaacaggatacaggtaatgtagaaacagataatcagctgccccagttgcaccagtgtgccgacgccgtatttaccgatggtaaacgccattgccccgaacgcaccaataggtgccagacgcatgatcatattgatgatgccgaagatgacctggctgaaactttcgatgacgttaaaaatcagttggcctttgctgcccagacggtggagcgcaaaaccaaacagtacggcaaacagcagcacctgcagaatgttaccgctggcaaatgcgccaatgacgctcgccgggatgacatccataatgaaggcgacaatgccctggtctttcgcctgatcggcgtaaaccgctaccgctttcgcatcaagcgttgccggatcgacgttcattccggcaccaggctgcacgacgttaacgatgataagaccaataatcagcgcgatggtactgacaatttcaaagtaaagcagtgcgactgcgccggtacgaccgaccgccttcatgctttccatgcccgcaatgcccgttacgacggtacaaaagatgacaggagcgatgatcatcttaatgagcttaacgaagccgtcgccaagcggtttcatttgctcgcctatttcaggatagaaatggccaaggagaataccaatggctatcgctgtcaggacctgaaagtaaaggcttttaaacagagaggttttcatagggtgtcctttagtaaaaccacaggtcttgtaaggttatggggtacctgcggccttaaaataacacccagacaacatcacagaaatgtacctggatcataattgaaacaaaaaggttaaaaagtttgagctggctcgcacaaaccagcactttttaaagttttgtaatcagtttggggtagttacttttcttccaggtaactctcttcgaagatttcaatagggagtgggcgagcaaaaaggaagccctgggcaataccaacgcccgcttttgccagccagtcgcgttgtgcttcagtctccacgccttcggcaatcatttgtaagttcaggctctgcgccagcatgataattgcagcaatcatgctgctatctcccggcaagccttcaacaaacattttgtcgattttcagtacgtcgattggcaagcttttcatatgctgcagctgacgcagccctgcgtagcccatgccgaaatcatccagcgccacccgaactccggcattgcgcagcggacggaggattgccaccgcagcatgagggtcgtcaatacgtcggctttctgtcacttccagaatcagtgttcccggctgaatgcgatagcgggttaacagttccagcatatccgccaccatattcgggtgcatcagttgcagcgcagagaggtttacgctcaagggcagcataatgccgcgctcttgccaggctgcaagcaatcgacaggactcttccagcacccagtgaccgacggtaaccatcagcccacagcactcaatgcgatcgattaagccatccggcaggtcccaactgccatccggttgctggatacgcagtaacacttccgcactgaccagtttaccgctggtcatctcgacctgtggctgtaaccaaatagcaaactgatgattttccagtgcattaaggatatcgctctcttccgtcaaccgcttctgggcggcttccatctgctgcggatcaaagaactgaatctgattcttgcctttatggcgagcggtaaatgccgcagaaatagcgcgactgtaaagctgttcggcggtgagatcgccgtagaacatcgccacgccaatgctacagtgcggacggagttgaatacgttcaatcggcaggcgctcgctcatgatagtgagcacttgctgacctaaggtgattgcgtgccacggttcctgtacaccgttggcaatgacagcaaagtcataaccgctaatctgcgcgaggatcatacgtgggctcagtacgcttttgagtttttccaccagcgtcagcagcagaatttctcgttgcgcctctttcagcacgcccgcagtatcacgcagggtttcacaggtgatgatcatcagcgcggtggtttgtttacgcgcgacaacctgctccagcatctccatcagcaaggctttgttcggcaaatcgctcaccgggaagcgcatcgcattttcgttctgttcttcataatggcgctgcagcaattgctggttgaggttgtaactgcgcaccaacataccgatttcatcgtcctgatgcagacgcggtaatgccagttggtgaccaacaagctccttggctgggatggcgttaagttcgcgagcaatattgcgtaacggatgcaaaatcaggcggttaatgcaccagctgatggcgacggtcaggataaggctcaaaagtaagtaaatggtcactaacgtactgagggtgctcatcacgaacttatacatacggaaggaatccgcctgtagtaccagataggcaattggctgcgggtttgccggacgttcgaggctgtaaacgcccaggctgatttgaaccggtagctcaaacaggcgagtaaccattaccggcaccgggcgctctggaataaaacttttacgcagcgcctggaactggttaggcagcactacatcggcacggctgaccacgcctgccggtttaatgctggcaagaatagcttccgcttcgggaatatcgcctttcaaaatagcactagataagggttcgcggacagagcgagcaatgctttccagttgcgtagccgtgttatagcgattctgctggaccagatggaacagcaaaacggtgcaaaaaataaaaacgaacaccaggacaacggctgccaccattgccatctgcttgattgttaacgagcgacttacgcgcaaattgtctccccccggaaatcccagattgccgcccgagtatacccgatcgcagcggcattaagagaggcgctatctgaaaacttaccagtcggcgtaaggtatcagcggctgcggcggtaaatccatgtcaccctgccatccggcggcggaataacgtacgtagagcaggaaatggctgggtgcgtaatctttcgcctgctggatatcaattgccgtgccaacaaaccagttggaagtaacacgtcgttcaagtaatgcccgcgccgtgtagccgaagccctgactgctgccgccatcgttggattgccgcgcagcttcttcctgccagtcggtcgggatcagattcatcagcggataacgcggcatggttttggtgcgactatggctccagctgccagacgcacccagctcccagctccagttttccgtgcgctcccgccacatcaccggtatggcaaagctcaggtattcctgcggactgtagtaaccgccctgaccgagactgtagccactcagatctttgtcgtaatgccagatcatgttgttcaggccgattgtgacgcggcgattgttctggttaatgaccttatagtaatagcccgtcatccagcgcacgcgccagttatcttcgacatttttaccggttaactggtcgccactaaggcttgcccagacgccgtttgcttcacctttatcgtagctcagacttagccccacaccgtcggcacgtacgccaccccattttttcccggtattgctcggggagtctttttgcccaccaaaggccagcaaagaactggagatgggccgacggtgggcgttaacggtgtaacccagcggcccgatatcatcgctgtaactgatgccgccgaccacatccaccacgttgaagcccatcggcgtggtaccgatatcccagctccagacgtcatttcgccagccgaccgccacgctggcaccggaatcgctctggctgcggttgccgctacagtcctgtaatgtacaggtgccccagttgtcatcccatttgccatcggcattagtggagaaactgccgacgttcatattgacgaaatcactgcgaaagaacatccgcccgtcagaatacggcgcatccacctgcaacatggtagtgtgcgctttcagatcggagtaaccaccggtgccgctgctaccccagtaatcgtgctcaagggtgacgttaagatcctgctggcgatagaggtccgccgcatcgctgcgcacgccacgtttcagccagtcatctttctcgtcgttacgggtcagtcgggtaaaggtgtcgttatcctgcggacgcgtcgtagtcacaccggatgcgaccatggcgtctttgtaggtttccagcgcctgcgttggatcgcccgcctgcgcttcaaacttcgcaccatcacgcagcaccatcgcgctttccatgctcggtggctgagattttgcctgcgggatcaacttattaaacgtccgctgcgctgctgcggtatcgccaagctgcgcctgtgccagcgccacgcgccgctgtgtgttcaggctggcgttatcggtagcgggcagtttcgccagctggctacgtgccgccgctttgtcaccggcagcaatatccacttccgtcagaccaagaatggcgtcggcgttagctggctcccgcgtcaggacattctgatatgcagcgcgggcggcggtgtaatcacgtcgttgttgcgcccagtcagccagcgtgaggtcaatacgcgtggaaggtggttgctggcgcagcatcgcttccgcttctgcctctttgccgctttctcgcaggcggttagcggtttccagcacctgatcgctttgcagtcgattaaccagctcctgaatattgctgttccactgcgcacgcggcaggctattgatatgcgccagcgccgctctgtcctggtcatgaccagagaggtacagcccgtaagcgtaaacctgctccgggtcgttgctcttctgctgcgccagattgcgcattaacgtatcggcctggctgcgttgtccggcctgccagagatcctggctaagtcggtaagtaatccatacgctgccggggtccagcgccagtcgttgccgctgaagtgctgccgcctgcgcccatttgccctggttttccagtgcctctgcctgctgtgccagacggtcgttttgcaggctgcgttcgatatcatcaatgctacgccgctgactggcagagaggctggcgataaacgcttcagctttttctgggctttgctggcggtaaatatttgccagcccgcgcacggcgttagtgttgccgctgtccatacgcaaggtctgctgataataacgttcggcggcgggataatcttttcgcgccatcgccacatcgcccagccccagcactgcataactgtcggtgttatcgacattacgcgcctgctggaacaggcgttctgcccggtcaggattattggctttcagcgcagcatcgccctgctggatcgccagccagtagcggtttactttcagcagactgttccatttgtcgttgttgctgctgtgcgggtccagtgcgagggctttttccagattcgccactgcattggcgcgatcgcctttctgagaatacgcctggcccagcgcccccagagcttcactgtctttcgggttcgcccgcaccgcctgttgtagttcgggaatggctttacccgccataccagagtccaccgccgctaaaccttgcgcacgagcgcggaaagcaggatcggccagctgtttttgctgttctgccagttggctttgcgcagccgccacgctatcgccatcactaaagatgctgagatattttttcagcgcgctcacactggcatcactgacgggcatgtctttaatctgcccgtaccagattttagaggccccttcgcgcccggcgttgctttttgccatctgttccaggacggcaaaaccttcgtcacggcgatcgctactaaacagcaatagcgccagattgttttgcaggcccgtattgcccggtgcatccgcattgatgcgttttaactgattaatcgcttcgccacggcgagccggaattttcgccaccgtactccagtactcgacagcaatgtcaccttccggcggcgcaccgttgaacagtttgttgtaactcgccacagcttcttctgcatgaccggtcgtcgcctgcaatcgtgcctgttgcagtgcctgacgaccatccggcgtggaaagtagcatcgtagtccggctgcttttatacgcattactactcggcgctaactggctcagccgatcgagctgtttttgcgcgccatcaatatcgccctgacgtaacaaagaacggaaacgggcggcaacgacgtccgggttattcggatcaataagttccagccgatataagctctgttgcaccagatcttcacgatgggtcgcttcgcctaaccgaacttgctccagcaactgttgctgagcggttggtgctgcctcgaccatcggcatgacggccagaccgagggaaagcgtgaatatgtttagtgtgaatttgcgcattcctggccccagtcaggtaattactttagtgactatttgcgcattcctggccccagtcaggtaataactcaccttttgtgctgaagcggaaacggtgttgatcccagccttgtccaaacagggtcagcacatagttgtaataggcatcgctgccgggaaagttatcggccacgcgctggcgctgaacggcctgcgcatcgcggttttgtaaaaagggcagcatggcggcagaaaaaccgactggtcctttaccctgcgctttccccgtagccacatccactttttccggcggataaccgtttttctcagtgaatgtcgccatcggtttaaaccggttgagcatccgcgctttttgcggatcgctgtcaggcatcatgcctacccacatgtaaacgcggatagcgtcgtagctgctgatcaatgttttttcggcttttagctgccagcctttgtctttctcatagcgcacccagtctgggctaaaacctttcggggcggtttccagcaataaacgttgattggtttcgcgcagcgtggtccacggcgcgccaaagcgggtgaaatactgcgccagcgtcggcggcaggtagctggggttaaaacgccagctgttatcctcagcaaaacccactttgcccggtaacaacatggaacccagcccaggcaccgtcaccacttcctcccgcgcgatacgttttagcaacgcgctgccgatgtcggtataacgctgctctttccacaaacgccccgcctccagcaagctccaggccatccagacatcaccatcggaggcgctattgctgtccagcacttcccacttactgttctctttcttgccccacagccaggcgggcaaacgttcttttaaagaaccctgagcgagattgttctgcgtccagtcgagaatattatcgaaagctgcacggtcgttagccgccagggcagagaacatgccgtaactttgcccttcggaggtggtgattttgcgcgcgtcgctggggtcgatgacgcgcccttcctgactgatgtaatcctttttaaactgctcccaggcaggccaggtacaggctgcctgaacactaaaggcagccagcagcagcatcgtcacgattccactacgcaacacattcatcttcaattactcgttatccgggttaagacgacgacgactaataattcgcagcagacgccacagtacccatgccagcaatatcacactgatagccgccagcaccgccagcagaatcggatggtttgccagcgcataccacacgcgctcgaaccacggcagatgacctacgtaataaacgtcgccaacacgtaggctgttgataccggactcgcggatcaccgcgacgctaccgaacatggtggcgcgtttgccgctatcgttcaccgcatcgttaagcatttcataaccgcgtgggctatctgccaacagcgcaatcacgctgcgctggtcgttatacgggctctggaagccaatcaccgccgccatcgcaccggaagaggtcagcgtactccgggtttctgccgcgcgatcgctctcgtccggcacaatgccggggaacggggtctggcgcatcggtgttttcacccagctttcggtcgcctgcaccaataggtcgatctgcttatcgtctttcagtttgtccgggataccaccgatgatcatgatgtcggcatctttgccctgaatggtgctgccatcatcggtcaccgtcagattaatcgccgggaagcccgtctgtgcgccgataaaaccaacagtattcagcaacgtttccatctgtgcttcgttaggcgctttcggcatcacggtgatggtttggctcagatccgccatccggctgaatgggaagcccgcgttagcaaaggcgcgtagatccggcatcgggatgaagtggtaatacttgctgaagtcgatggtggagtcgtcaccaatcaccacatgattctgcaccggctggaaggtaatacagttatccacgctaccgcccggcatcgggttcatatactcaaagtcgaagcgcagctggttggtcgcgcccagtttcagcgccggaatagagacatctgttttgccatccagcaaaccttgtaataccggaatccgcagcagcaggcggttcgcctcctgtttgctgctcaggttgaaggattgcaggaactggttattcaggctgatatccatccggctactgtctttcaccggcggcatggtgtagcggtaattaatatccatatcaatgccggtactgcgcatcaggtagagatccggcggcaggtttaggctaacgttaatcgctgctggctcaagaccgctggattgtaactgttcttcataggttttcagttcgccaaatgtgaccggacgatcggtacgtacccagttcggcgcatcgtacggcttacgcggtagcagcggtttcacttcattcactaccacgctttcaccacggaacagaatgttaccctgagcgatacctttcgctgcctgcaacaggtctttgtcgtcacgaccaaacaccaccagcagtttgacgtaaggattctgcggatggttaatcatctcaatcaccggggcttttaccgccggatgatcgcgcaggaagtccggccgtttgtcgttggttgcaaagacaatggcattgcgatccggcagttggttatagagtaccgggaagttctgcccacgccagccagaacggctaccaaaccagctggcgacaatggcagaggcttgttgcagcccaacatccggcgcacccgcaaagaccatcggcaaggtgttggtgcggttatcgctcgggtcaaagaatggcaccgggaagtgactcaggtcattcttcacattcagggtctgataggtcagatccagtccactgctccgcccaacatccagccaaagcgtggtgctggccggtttttcgcacacgtcctgataatggccgacaaactccagccgtacacggttgaagtcgctaataaacagtgggttaatgggcatttgcgccagcgtttttttacccaactgttctttggtcactggcagcacgcccatcagttcatcattgagataaacctttaactggctctggacaggcagtaagcttgggcttggggtgtattcgaagttgagcatcgccttcgtcaccacttcatcgctgcgcataccaaactcaatgctgccgttcgggttaatgccacgtagcaccatgctgcccggcggcggtgcaatttgcgcaaaggtcagcttcacatcacggctaggaccgttctgcgccacgactggcgcatcagcgccctgcacgcccggcatcacttgccccacctgcggattttgttccgtctgggcggctacagctggctcagcattgatcagtggttgcgttgctggcgtcgcctgcgtcatgaaagaggggaacgcactcatccccatagccactgcacaaatccagaatagttttcttttcatcgcgttatcatcattgttgagccaaagcctgatcgcttggttgtgccgtttcgctccgctccgggcggcgcggaataaagcttacaacccaggaaaccagagaagtcagcacacggaatatgcccttcacgctagaaggcgcaaactccgccagatggcggtagccacggaagccgagcttcagaatatccagcagactttccagcggcttatcttccgggtagctgtcctgccagagcgcccatgtatccgcacgggcaaacgtacactgcacaaaatcgatatgttgctgggtggtgagcggcattaatttcagcccaacttcattacccatcacgcgcgccacctgggtcgggaagacgtattcctgctgaccgcgtttaagcaacagattcactttctgcccttccagaatctgcgcctgaccgttgatcttgatccccaaaccaccgtcggagaaatcctgaacggtacagctgaagaggtgaccatcttcgcgggcaattgccgcgggcatcgtcatctccacgcggtggcttcggcgtacctgtttgctttctacgcttaccgcaactgcgccgccaagaacaatcaggttgtagaacacccacaccatactgacgaccacggtgagcatctcggttggcgggccatagaagtagcgccagatgcctaccgcaacgcccaccaggttgagcaggacaaggaagatgtagggccggctgatcacccagtcgacgtactcttcttccaccagtccacctttggcggtgacgttaaatttgcctttgtgcgggttaatcagcgccaccagcgtcggtggtgcgatataccacgccagcaccgtttcgtagatttcactccagaaagagtggcgatatttgccctggatcttggagttggtcaggctggcatggatcatatgcggcagcacgaatagggcgatcatcaacgctggcgcatagatgatgtaggcatgaagcagcaggaacgccagcggcgcagtcaggaagatcagccgtggaatgccgctcaagaagtggaacatggcgttgacgtaacatagccgctgagcaaacttcagccctttaccggtgagcgggttatcgagacggaagatttgtaccatcccgcgcgcccagcgaatacgctgaccgatatgcgcgctcagactttcggtcgccagccccgccgcctgcggaatacgcatatacgcggaggtatagccacgacggtgcaaccgcagagaagtatgcgcatcttcagtcacggtttcgacagcaatgccgccaatttcatccagcggcttacgacgaatcaccgcacaggaaccgcagaagaaagtggcgtcccacatatcgttgccatcctgcaccagaccatagaacagcgtgccttcgttcggcgttttacggaaacgccccaggttgcgttcaaacgggtccggactgaagaagtggtgcggcgtctgcatcatcgccagctgtttttctttcaggaaccagcccatggtcatttgcaagaagcttcgcgttggtacgtggtcgcagtcgaaaatgctcacgaactcgcctttggcatatttcagcgcattgttgatgttgcctgctttcgcatgttcatgagtggtgcgggcgatatatttcacccccacgttttgcgcaaactggcgaaactcttccctgccgccgtcatcaaggatccagatattcagcttatctttcggccagtcgatacccaggctggcgtaaatggtatttttcaccacgttgagatcttcgttgtaagtcgggacaaagatatccacgctcggccacaggctcatatctttcggcaatggcaccggctgacgattcagcggccatactacctggaagtagccgagcaccagcacaatccacgcgtacgtttcagcgaagagcagaataagcccgcacaccaggctgaccggatcgtcccagttcagcgtagaggtgtaacgccaccagatataacggcaagaaacggtcaggctcagcacaatcaacattagcgcgctgaagcgccccggcatccgccgtacgatcagcgctaccccccacagcagcatcaggaagataaactgcgccagcgggttaaacggctgagtaacgcagattaacgccagaatcaggctgaaggtgacgatgataccgaggatcaaccgccgcgccccggcactcaaatgaccgagctcttttttctcatccagatgctgtgttttatggctaacgcgctcaggcagctcgttcatccattgatggtaacgtccacgaatattttgcagaccactaaatgcccgcctgcgcggtttcggcgtttctttgcggcttgcaccgatcaataaccagcatgtttgaatgagataacggaccgggtccagcggacgcggacggctggcgttgatatgcggatacaggtttttatgttctgcgcgaatacgctgccagcgcgggtgctccagcggaataaaaatccaggccaggatcatccagaaacagccgagcgtcgcgctgaaagcgctcgcaccgtgacgacgataatcgcgataacgcccgataagccgcgcgttgaccggcgggataagcaaccaccgggtcaggatactcatgatgcactcccgactggcgtttacatcaacttgcactcccgactggcgttttcagcccggagtagttcaacaggcaccagttcgccagcgtcagtatctcttcagccgccagcgcatcactgcgatattcacctactggttgcttagccgccaggcattcagccatcgcttcatcacgatgaatgagcatcggcagtaatcggcgctggctttgcaaccaaagctggtaaatatcgtcctgaacctgactgccaatacggaagtcattaatcaaaatatgtgcgccatccggcagcgcttgctgatgcagtcggatatggcagttggcatccacattgacgattgccaggctgtgatcgcacaaactcagcagctggtgggttatctggctggcatcacgcggtaagtcgattaaaatccactggtaacgcccgctggcttttagttgctgtaagccggagcaaatatcgctcagccgggtttgccagtgctgtggattttcttgttcttcaatggataactgaccaaaaggcagcaaatcgagctggctggtgtagcgcaacccagcgtcacgccagtcctggccatccagcatcgctctggcccagccctgacggtgggtaaaatcaacattaaaactcaggcgcaacaagttgtccgggcaggcatcgaccaccaggacattttctcccaacatttgtaaactccaggctaatgcggcggtgatggttgttgtccccacgcctccccgcaccccctgctatcccagtacggccattcaccaatcccttacttttgttgcgcaaactctgccagcaacggccagcgttttaatgccgcggccaactgttcgcgttgggaaatatcggcataatcaatatcaggcagactaaatgcctgctttaacgccacaatatcattctggaagatatagcctatcgcgggatcaggcagagtatctggttcattgttattcattttgcttgatccctatgaaataaccgtaccgttcatgagacaattctaaccgtgagcatttcgccggtttattgtttacggcgagacgggaatttgctcactttttgactttccgttacgcaacagaaaaagttaaaaacgaaaagactaaaatcacacgtcttgtgaccttctaaattgattcacatgctaaatctgataagttttaatttcaatggtaggtttatttcttagctttcgctagtaaactgataatcagacaaaatggtgacatgagggacattgtggaccctgtattctctatcggtatcagtagtttatgggatgagctgcgacatatgccagcaggcggcgtctggtggtttaacgtcgatcgccatgaagatgctatcagtctggcgaatcaaacaattgcatcccaggctgaaaccgcacacgtcgcggtcattagcatggacagcgatccggcgaaaatctttcaattagatgattctcaagggccggaaaaaataaaattatttagtatgctaaatcatgaaaaaggtctatactatttgacccgtgatttgcagtgttctattgatccccataattacctttttattcttgtttgcgcaaataacgcatggcaaaacattcctgccgagcggcttcgcagttggttggataaaatgaataaatggagcaggttaaaccattgtagccttttggtaattaatcccggaaataataacgataaacaatttagtttgttgcttgaggaataccgtagtctttttggtcttgccagtttgcgttttcagggtgaccaacatttgctggatattgccttctggtgcaacgaaaaaggggtcagcgcccgtcagcagcttagcgttcagcaacaaaatggtatctggacattagttcaaagcgaagaggcggagatccaaccacgcagcgacgaaaaacgcattctgagtaatgttgctgtactggaaggtgcgccgccgctaagcgaacactggcaactgttcaacaataacgaagtcctgttcaatgaagcccgtaccgctcaggcggcgacggtggtcttttctttacagcaaaatgcgcaaatcgagccactggcccgcagcattcataccctgcgtcgccagcgcggtagtgcgatgaaaatcctcgtgcgggaaaataccgctagcctgcgcgccaccgatgaacgtttgttattggcctgcggtgcaaatatggttattccgtggaatgcgccactctcccgttgtctgacgatgatcgaaagcgtgcaagggcagaagtttagtcgctatgtgccggaagatatcactaccttgctgagtatgacccagccgctcaaactgcgtggtttccagaagtgggatgtgttctgtaatgccgtcaacaacatgatgaataaccctctattacctgcccacggtaaaggcgttctggttgccctacgtccggtaccgggtatccgcgttgaacaagccctgacgctgtgtcgccctaaccgtaccggcgatatcatgaccattggcggtaatcggctggtgctgtttctcagtttctgtcggattaacgatctggataccgcgttgaatcatattttcccattgcctactggcgacattttcagtaaccgtatggtctggtttgaagatgatcaaatcagtgccgagctggtgcagatgcgcttgcttgccccagaacaatggggcatgccgctgcctttaacgcaaagttctaaaccggtcatcaatgccgagcacgatggtcgccactggcgacgaataccagaacccatgcgactgttagatgatgctgtggagcgcagtagttgatataagatgctgtggagcgctcatcatgatgaccatcagcgatatcattgaaattattgtcgtttgcgcactgatatttttcccgctgggctatctggcgcggcactctttgcgacgcattcgcgacaccttacgtttgttctttgctaaacctcgttatgttaaaccggccgggacgttacgccgcacggaaaaagccagggcaaccaaaaaatgactcaatttacgcaaaataccgccatgccttcttccctctggcaatactggcgcggcctttccggctggaacttctattttctggttaagttcggcctgttgtgggcgggatatcttaacttccatccgctcctcaatttggtgtttgccgcgtttctgctgatgccccttccgcgctacagcctgcatcgcttgcgccactggattgccctgccgatcggctttgctttgttctggcatgacacctggttgcctggcccggaaagcataatgagccagggtagccaggtggcggggttcagtaccgattatttaatcgaccttgtcacacgctttattaactggcagatgattggggccatttttgttttattagtggcctggttattcctgagtcaatggattcgcattaccgtttttgtggttgccatactgctatggctgaacgtacttaccctggcgggaccaagtttctccttgtggccagccggacaaccgacgaccactgtaacaacgacgggtggtaacgcagcggcaaccgttgcggcgacgggtggcgcaccggtagtgggtgatatgcccgcacaaactgcaccgccaacaacggcgaaccttaacgcctggctgaataatttctataacgcggaggcgaaacgtaaaagcaccttcccgtctagcctgcccgctgatgctcagccatttgaactactggtgattaacatctgtagcctttcctggagcgatatagaagccgccgggttgatgagccatccactgtggagccatttcgatattgagttcaagaactttaactccgccacctcctacagtggcccggcggcgatccgtttactgcgcgccagctgcgggcagactagccacactaatctgtatcaaccggcaaataacgactgctatctgtttgataaccttagcaaactgggctttacccagcacctgatgatgggacataacggccagttcggcggttttttgaaagaagttcgcgaaaatggcggcatgcagagcgaattgatggatcaaacaaatctgccggttattttgctgggctttgatggtagcccggtttatgacgataccgctgtgcttaaccgctggctggacgttaccgaaaaagataaaaacagccgtagtgccacgttctacaacacgcttccactgcatgacggcaaccattatccgggggtcagcaaaacagcggattacaaagcgcgggcgcagaaattctttgatgaactggacgccttctttactgaacttgagaaaagcggtcgtaaagtgatggtggtcgtggtgccggaacacggcggcgcgctgaagggcgacagaatgcaggtatctggcctacgtgatatccctagcccgtctatcaccgacgtccccgttggggtgaaattcttcggcatgaaggcaccgcatcagggggcaccgattgtcatcgaacaaccgagcagcttcctggctatctccgatctggtggttcgcgttctcgatggcaagattttcaccgaagacaatgttgactggaaaaaactcaccagtgggttgccacaaacagcaccggtctccgagaacagtaatgcagtagttattcaataccaggataaaccgtacgttcgcctgaacggcggcgactgggtgccttacccgcagtaagaacgaaaaaggccgcagagtttcccccctgcggcctggtccgggcgcaaattgccattacggcagcctgacgcccgcatgacacgttacttccgcttgttcagccagttcacgatcatactggcaagaatgccagcaatgaccggagccgctaaatcatgccagaaggccatgcccagctctgcgaacgtcatatagccgcctgtgttgtaatgacaacgtttcgcggctattcttgagtggtctagagtcaagattagcccccgtggtgttgtcaggtgcatacctgcaacgtgcgggggttttctctctccagcaaccaatgccaccagggataaagcccccgcaacattgcgcctcaccggaacctttccggcttgccgctgattctacgattgctttttactgtcagcacccggcaatcttcctcattgcgcgatgccttccagcttaatttctttatttgcaatagttgcagttcatatccgggctgactccagactggtagtgaaatgcgcaattttgtagaattgcgcctcctcgcgacctccccagtgaatctgttgcctcattttttacatactgcgtattcgacttctccacctgttgcgcaagagaaactgggtttattcatttttgcgaggccgacttctttctggacaggactttatgcagcacaacacactaagcaaacacaatcagaaattgccgtttacacgctacgacttcggctgggttttattatgcataggcatggcgattggtgccggaaccgtgctgatgccagtacaaattggcttgaagggaatttgggtatttattaccgcagcgatcattgcttatcctgccacctgggtagtgcaggacatttatttaaaaaccctttctgaaagcgattcctgtaatgactacaccgatattatcagtcattacctggggaagaactggggaattttcctcggggttatctactttttgatgattatccacgggatttttatctactctctctccgtggttttcgacagcgccagctacctgaaaaccttcggtttaaccgatgccgatcttagtcaatctctactttataaagtcgctattttcgccgtactggtggcgattgcgtctggtggtgaacgattactgtttaagatttccgggccaatggtggtggtcaaagtagggattattgtcgtgttcggttttgcgatgatcccgcactggaatttcgccaatataaccgccttcccgcaagcctccgtctttttccgcgatgtcttgcttaccattccattttgcttcttttctgcagtatttattcaggtacttaacccaatgaatattgcctatcgtaaacgggaagcggataaagtactggcaacccggctcgcgctgcgtacccaccgaattagttatatcacgctcatcgcggtgatcctgttttttgcctttagctttaccttcagtattagccacgaagaagccgtttctgcctttgaacaaaatatcagtgcactggcgctggccgcgcaggtgatccctgggcatatcattcatatcacctctacggtgcttaatatctttgccgtactgaccgcattctttggcatttatctcggtttccacgaggccattaaaggcattattctcaatctgttaagccgaattattgataccaagaaaattaacagtcgcgtgctgactctggcgatctgcgcttttatcgtcattacgttgacgatttgggttagctttcgtgtaagcgtgctggtgttctttcagttgggaagcccgttatatggtattgtgagctgcctcattccgtttttcctgatctataaagtcgcacaactggaaaaacttcgcggatttaaagcctggctgattctgctgtacggcattttgctatgcttgagcccactgttgaagctgattgagtaaaccggagcgcatggccccggttttgtgagttaacgctgcggattttcatcctgatcaacagcaaaacaagctaccagttgaccgccgtagtcttttagctgcggctgcaactgggtgcaggggccgaagcgccgacgacagcgggcgttgaaggcgcaacccggcggtggattcagtgggcttggtagttcaccgctgagcttgatgcgctcgcggcgatcgtccgggttcaggcgcggcgtcgcggaaagtagcgcctgagtgtacggatggcgcgggttattgaagatttggtctttcgttcccttctccacgcagcggcccaggtacatcaccatcacttcatcagcaatgtgctccaccacgctcaggtcgtgggagataaagacataagacagccccaactcctgctgcaaatccatcatcagattcagcacctgcgcgcgcacactaacatccagcgcggaaaccggttcatcggcaatcaccacatccgggtcgagcatcagaccacgggcgatggcgatacgctgacgctgaccgccggagaacatatgcggatagcggtcatagtgctcggttttcaggccgactttcgccatcatgctcagggctttttcccgacgctgttctttgcttaagctggtgttgatcagcagcggctcttcaagaatttgcccgacttttttacgcggattcaggctaccgtaagggttctggaagacgatctggattttctgccgacgcagcttctgcgcctgcggatcgtgcttaagcagatcctgcccctggtaatacagctcgccaccggtgggcatttcaatcatcgtcagcaaccgaccgagggtgcttttaccgcagccagattcgcccactactgccagcgttttgccacgttcaaggttaaagctaacgccatccagcgctttaaccagacgttccggcgcgaacatgcctttcttcaccggataatgttttttcaggtcgatagcctgcaacagcggttgttgcagggtggcctcttgcgtactcatagtgtcggcctcccggcatcatcaagtgggtaatggcatttggactgacgcccgtcagcgagcatattcagcgccggttcttcagcgcgacatctgtcagtggcataggggcagcgcgggttaagcaggcagccgttcgggcggtcgtacttgccgggaacgacacctggcaagctcgccagacgttctttgtcctgagcaaattctggcagcgcacgcagcaatgcctgagtatacgggtgacgcggcgcatggaagatggcgtgcgcatcaccggtttccaccacctggcctgcatacatcacgatgattttatgtgccgcttccgccaccagcgccaggtcatgggtaattaacaccagcgccatgttctctttctgctgtagctccagcagtagttcgatgatttgcgcctgaatggtcacgtccagcgcggtggtcggttcatcggcaatcagcagttttggccgacaggcaatcgccatggcgatcatcacgcgctggctcatgccgccggaaagctgatgcgggtaaacatccagacggcttgccggatcgggaataccgacctgattcagcaggtcaatcgctcgctgacggcgggtacttttgttgccgccctgatgcaccttaatcgcttccataatctggaaacccacggtgtagcacgggttaaggctggtcatcgggtcctggaagatcatcgccacttcggcacccaccaggttgcggcgctctttttcactgatacgctgcaaatcctggccgttaaactccagtttttctgccattacgcggcccggataatcaatcagccccataatcgccagactactgacgctcttaccggagccggactcacccacaatcccgaccacttcgccctgttttacgctgtagctgatgcggtctacggcgcggaacggcgcgctttcgtcgccgaaatgcacgcttaatttatctacatttaataacgccatctcgaacctcttactgcttcagtttgggatcgagcgcgtcacgcagaccgtcacccatcaggttaaatgccagcaccgtcagcaggatcgccagacccgggaaggtcacgacccaccaggcgctttgcgcgaactgcaacacgtcggagagcatggtgccccactcaggcgttggcggctgtgcccccatgccgaggaaaccaagagcagccatatcgagaatggcgttagagaaaccgaggctcgcctgaacaatcagcggcgcaaggcagttcgggaagatgttaataaacatctgacgcatcgccccggcacccgccacgcgagacgcggtgacgtaatcgcggttaacttccaccagcacggcggcgcgggttaagcgcacatagtgcggcaaggcaacgaaggtcagtgccagcgcggcgttaccaatgctcgggccgaaaattgccaccagcaccagcgccagcagcagacttggcagcgccagcatgatatcgaccacgcgcataatgatgttatcgaccaggccgccaaagtaaccggcgatcaggccgagaataacgcccataatcaggcttaacacaactaccagacagccaaccagcaggctcaggcgcgcaccgtacatcaggcggctcagcacatcacggcctacgtcatcggtgcccagcaagtgcgccatgctgccgccttcctgccaggctggcggggcgagcagtgcatcgcggaactgttccgccgggttatagggtgcaatccagttggcaaagatcgcgatgaacagcacgatgacgacgtaaaccagcccgacgaccgcgcctttgttgcgtttaaaatagtgccagaactcctgtaacggggtcatcggcaccggtgcgctaatcactttattttcagtaacctgactcatgatgtccccttacttcttatgacgaatacgcgggttcaccacgccgtacagcagatcgaccagcaagttgacgaggataatcatcgtcgccaccagcaatacgccgccctgcactaccggatagtcgcggcgttgcagtgcgtcaatcaaccagcgtcccagaccgggccagctgaagatggtttcggtcagaatcgcccccgccagcaatgttcccacctgcaggccgataacggtcaccaccggcagcatcgcgttacgcagcgcatggacgataatcacccgcatgcgggttagccctttggcgcgcgcggtgcggatgtaatcctcgcccagcacttccagcatgctggagcgtgtcatacgcacaatgaccgccagcggaatagtacccagcacaatggcaggcaagatcatatgggcgacggcatcgataaagttgccgtcttcaccccagatggcggtgtcgattagcataaaaccggttaacggattggagtcatcgaggaacaccatatcgctcacgcgaccggagacgggcgtcaggttccagtgcacgctaaccagcatgatcagcatcatgccccaccagaagataggcatactataacctgtcagcgccaggccaaccgctgtgtgatcgaaaatggaaccgcgtttaaccgcagccagcacgccgaccggaataccgactgccgtagcaaaaatcatcgcgcagacgccaagttccagcgtggcctggaagcgcggcacgaactcttcccaaaccgggatgcggcttttcatactaatgcctagatcgccatgcataacgccccaaatgtaatggagatactgctgccacatcggtttatctaagccgagttcagccagcagctgcgcgtgacgctctggggagatcccacgttcgcccgccatgatcatcaccggatcgcccgggatcatgtggacaaaggcaaatgtgagaagggtaataccgataaacgtggggatgacgagtcccaaacgtcggagaataaactgcaacataacccggattctctatagtgacccgcagcctggaactgcgtgtctgtattgctcacaaatcaattcccgcccttatcggacagggaatgaagtattgctgccggatggcgctgcacgcagaggcacagcgccaccgggtatacagattgttgacaaagtgcgctttgtttatgccggatgcggcgttaacgccttatccggcctacaaaatcgtgcaaattcaatacattgcagaattttcgtaggcctgataagcggagcgcatcaggcatttttgcctttgccatcagtcttgtatggcttttaattattcgatagagacgttttcgaagtgatgtttgcctaatggatcaaccacatagcctttaacttctttacgtaccggttcaaacacggtggagtgagcgatgatcagtgccggagcctgatcgtgcatcaccacctgcgcttgtttgtacagttcaacgcgtttattgtggtcgtcggtagcacgcgccggttgaatcagatcttcaaacggtttgtagcaccatttactgtagttggagccttgttcagaggcggcgcagctgaacagggtggcgaagaagttatccggatccccgttatcgccagtccagcccatcattaccgtctggtgctcgccatctttcgcacgcttgaggtactcaccccattcgtaggtgacaattttggcctgcacgccgactttcgcccagtctgcctgaatcatctccgccatgcggcgagcgttcgggttatacggacgttgtaccggcatcgcccacaggtcgatggagaaacctttttccagacccgcttctttcagcaaggctttcgctttttcaggatcgtaggtgtagtcctgaacgtcgtcgttatagccccacatggttggcgggatcaggtttttcgcacttacgcccgcgccctgataaaccgctttgatgatcgcgtctttgttcaccgcgtaggtcagagcctggcgaactttcacgtcatcgagtggttttttctgcacgttatagctgagataaccgacgttcagccccggcatttccatcagattgatggatttatcctgcttcatgcgagcgatatctgccgggttcgggtacggcatcacctggcattcattcttctgcaatttcgcgtaacgcacggaagcgtcaggggtaatagagaaaaccagcgtatcgatctgcggtttggtgccccagtagccatcaaacgctttgtagcggatacgggaatctttttgatactgctgtaactggaacggaccggttccgattgggttgaggtccagtttttccggtgtaccggctttcatcatcgcatcagcatattctttactcagaatagaggcgaagtccattgccaggtcagcgaggaacggcgcttccgggcgagtcagcacaaactgaacggtgttgtcgtccacctttttcacttcactgatcagctctggcaagcccatgccttcgaagtattcgtagctgccgccagaaactttatggtacgggttttgcgcgtttttctgacgatcgaagctgaacaccacatcatcggcgttcagttcacgcgtcggtttgaattctttattgtcgtgccacttcacacctttacgcagatggaaggtataggttttaccgtcttcgctgacttcccacttttcagcgaggcccgggatcacttcggtggtgccgattttaaattcaaccagacggttataaagcgggacggaagaggcgtcataggtggtgccggaggtaaacagctgcgggttaaacccttccggagatccttcactgcaataaaccagagttttagcctgaacacttgctgcgacggtcatagccaccaggctgagaccaagcttcagcatcccactctttttcaaggaaatacgcattattctgctccaattgtgatgtttgttgttttaaccctttgcagtgggttgtcgctgcctgaccttttttgttttttgcccggtcgggtcaacgttatgaggtggggatgccgtactaattaacatcagtgtaacagtgcggatcctccataaaatgcccctcgtgacctacaatctgtcaacagaatgtgaaaacgtcaatacagccaaccgggatttacaccaacggtgagaatccacacacaaagattaaaaaaacttcaaacagctatttgcagcagagaaatttgtgctactccaacatgaccagaacaatcagcttaatatttagcaacatttggtgattaagttttatgcatttaatgaaaaaaatctgaggaaaaggtggatatctgagcgattaataccatgaacgctaaaacgcacagcggaaaatgccagggccagccataagtaacgcaaaaaaagatttaagcaaatataaaaaaagacaatggtttctgtcacaaatccgttaatggatagtgagatatggggcgcaaatttggcagggaaatgtgtgtcgtgtaggtcgaataaggcggtcgcgccgcatccgacaatggccggcacatttgcctgatgcgacgctgacgcgtcttatcaggcctacgtcgagtcgaacctccctgcccccggaggttctcatcctcatgagctgcagatgcaaaaaagcctgctcgttgagcaggcttttcgaatttggtcggtgatagaggattactcgccacttcgtggctcgccctgcgggccgttgctggcgcaacgttctctcgcttcgctcgagtcgaacctccctgcccccggaggttctcatcctcatgagctgcagatgcaaaaaagcctgctcgttgagcaggcttttcgaatttggtcggtgatagaggattcgaacctccgaccccttcgtcccgaacgaagtgcgctaccaggctgcgccaatcaccgaatgcggggcgcatcttactgcgcagatacgccctcgtcaatcccttaatagcaaaatgccttttgatcggcgagaaagtcagcaggccgcttagttagccgctgcctcttttgcctgcgggatgtgacaccagttgttgttttcgttaattccaccatccggactagtatagccaagacaacccatgatggtatcgtacagctctacgtgacggcgtggcactttcatgtcggcttcttttttcagctgcgcaaacgcctgcgcattggccggattttccagatatttatcactcatccagaccatcatcggtacgcggaactgctccggcggtgccagttcacgcggcgtgccgtgcaggtgctcgcgttcattaatactctcaccgtggtcagctgcgtagaacacaatcgctttcttatcgcgaacctgatcaatcacgctggagataaagtgatccacataggtcacgctgttgtcataggagttgatcatctgcgctttggtacagccgctatcaacaccaatacattccggcttccactgcgcgaagctacgcggataacgctgggtgtagttaaaatggctacctttggtatgcagaatgatcagatgcttaccatccgggttgcgccctaggctttgctgcatttcgtctaccagcaacatatcatctaccggcttgccacgattacgtggctccgcaccaatctgctcacgataagcaatgttgtccgccatcgtgttgctgtagaaccacatttcgctctgcatagcgtagaggtcagaactgaatcctaactgcttcagaaccgcgaaaatgttctgttcttttaatgtgcgctgcggattatcttccgcgcccccctgacgtacaaacatgcaacgcagactgagtttggttgcggtatcacaggagtaaccacggaacgccgccagatttttctcctgggccagtttcggcgtggtattacgctcatagccgaaaatacccatatggtcccaacgcgtggtttcaccgatgataaacacgacataagtgtcatcaacgttttgcggtgcctgataagtgaatttcttcgccggattaagcaaactattattatcggaagattcatcgacccgcgcccaggcatacagccccaacgcagaaagccagttacttggcagataagagttcgctacgacaccgccataactcggcaaatcaacgccggtcgccctctccactttcttctgctggatatccagcaaacgaatcggtgcccaaaccataatacccgccagtacgacgaccgccaggctgcgaatacgctgccctggggttcgcagttgtcggagcaaggtgtagcgacagcggttattccagataaggataagaggcaatgcactaacggcgattaaccagagaataaagttcagaccaacaacttctttactcaggtcgatatcggtggtcatgacggaagcgatgatgccataaccaatgaccacattaaggaaggtcatgtaatagctggcacctgcggaaaagagcaccaccaggcttgccagaatacgccagctgcggcggccaaacaggctaagaagacgtagtaaaaagaaggtcaccagtacggtggcggccagttcaacaacagcagaaatgcctttccagacggtaaaatcgtgcgcatagctgccgaagcggcggtaaaaaaccgcgccattcataaaaaggccaatatagattgcaagcaaaaagctcagcttctgctgtgtaatgcttttgatgtatctcatgcaaacaaaccctggacaaacaggtgataacaccctgcttagtggcttttcaggcccggcagggaaaaagtgcggaggtagtcagataagtaaaatctacacgcgcgaataagtagaccacagcaaagggaaaaagtgtggggaaagagtgtgcatgaagcacaaatttacaaaaatgcaagtttgaaaagagactttagcgttacaaaaagcagtaaaaagggccagttaattggcccaaattttacgagtcattgtttatacatttcgttgatgcgtttgatgcacacggaagctgaagcccagtagctcgcggctgagcattaaagggagccatgcgcctcacgcaacattttctgctctggctgacgaatcgtcgtagaaagcgccaaactcagaatcagcagggcgaaaatcacgtagaaggtcacatagaagccgccaaacagactggcgataatgctaccacaaatgctaccgataccgaaaccgagataaatcacaccgtagtttttcgccaggttattgaggccaaagaactcactgaccagactcggaaagacggtaatagtgccgccaaagttaaatgccacgcaggcaatcgctgcaaagaacgtcactgcattcaatggtgcaaacagcagggccgccatacccaccaggcttatcacctgaccaatggtaataacacggatacgggcgattttgtcagacagaatacccagcaccagacgaccactaaggttggcgatggaaataacagtgactgcattggctgcggaaaccacatcaaggtgtgccagactttgggcgatatctttcgctaccccaatcacgtacaggccgctcatgcaggcggtcaggaacattaccgctaacatccagtactgcggtttacgcatgctctctgccagcgtgtaatctttctccaccacaccattgctggttttcacttcctgttttggtgcgtctttcattaacgttgcgccgaaaacaatcatcaacagcgcaatcgctccccaaatcacaaaggttttttccagaccgaccgtttccagcagctgcgtgtcgataaatttgaaacccaggctacccagaccataagaaccgatagcgaacgcggagatcagacctttacgctccgggaaccacttcacacagttagagagcgtcagcagataacccgcgccatctgccagtcccaccagcacaccggcgcttaaccacagcatcatcaggttgtcagaatgcgctgtcaggaagaagcctaatcccagcaaaatgccggaagccatggtgacgcgtttaacgccaaaacgttcctgtaatttgcccgcaacagaagagctaattgccagccccagacttaacaagccgaaagagaaagcgacctggcttaccggcgcatccagcttggcggaaagcgcgccattaaacaggctccaggtataaacgctccccagcgcaaactgggtaatgatagtaccgatgagtgtcagccagcgggtacgctgataattactaggtgtcatggcagtattcctgcagtaataaaaaggaaaaatctctgccgacaaccataacgaagtgcactttatgcctggggaaaaacggcatgaaatgccatcagaacggaatgaaatgccttagttcaggaatgaatgacgcgacaattattcaccaaatttattatttggtaagttagcacccactatcgccacaactattgttatttaatggtttcaattgtgactgttacgttaaaatctggcgctaacccccatcgtatacagatagtcgctattattagtggtattttctgcctgagttagcgcggcataggcggcaatattttgattgagcaacatatcagcgcctacggtgacatccagccagttgccgttctggtttgtcgccgtcatccggctcaggccactttgcgccttccagatattctcgccaaattgctggttatagctgatttgcgcccagggtcggagatcgccaagccgggagtcaacacgccagcctaaggtactcacgctggcatgccataacggatcggtcagcgtggtagtactgtcgccaaactcgttatacatgctggtggttgtgccatcgtaatgtaatgccgcgaccgggccggttgtaacctgttcatataaaggaaaattccagcccatactcatactgctggtcacatccacaggggtttcttccgccagattgacttccagtcccagcgccctttggctactttgaatacgttggctcaaaatatcgttgtaatcaggttgatgatcactatcccaggtgtaacgctctgtggaaagtccgggttgcgtatcaacgatatattcttgttgccaggcgtaagctgtgttgagaaaaaaggcactgattaccacgctcgccagcaggcttagctgccagcgaccaccgcttttttttatgatcattaacacgactccagggaagagccgaattcggcaatattattgtcattgtatgaaggatatcgggcatagtagccctgtattaaatattgactttttcaccgatgcgtcaagaaaagcggctgaaatttttacgatcgggtacatagcgagggaaagtatggaacgttgcggctgggtgagtcaggacccgctttatattgcctaccatgataatgagtggggcgtgcctgaaactgacagtaaaaaactgttcgaaatgatctgccttgaagggcagcaggctggattaagctggatcaccgtcctcaaaaaacgcgaaaactatcgcgcctgctttcatcagttcgatccggtgaaggtcgcagcaatgcaggaagaggatgtcgaaagactggtacaggacgccgggattatccgccatcgagggaaaattcaggcaattattggtaatgcgcgggcgtacctgcaaatggaacagaacggcgaaccgtttgtcgactttgtctggagctttgtaaatcatcagccacaggtgacacaagccacaacgttgagcgaaattcccacatctacgtccgcctccgacgccctatctaaggcactgaaaaaacgtggttttaagtttgtcggcaccacaatctgttactcctttatgcaggcatgtgggctggtgaatgatcatgtggttggctgctgttgctatccgggaaataaaccatgattcgggaagcgcaacgtagtgaactccccgcgatcctcgaactgtggctggaaagtacaacctgggggcatccctttataaaagcgaattactggcgtgactgcattccgctggtgcgggatgcctatcttgccaacgcgcaaaactgggtctgggaagaagacggtaagcttctcggttttgtcagcattatggaaggccgatttctggcagcgatgtttgtcgcaccgaaggccgtcaggcgcggtattggtaaggcgctgatgcagtatgtgcagcagcgccatccccacctgatgctggaggtttatcaaaaaaatcaaccggcgataaatttttaccaggcacagggttttcacattgtcgattgcgcatggcaggatgaaacccaactacccacatggattatgagctggccggtggttcaaacgctgtaattaactgctggccggtggttcaaacgctgtaagtgtcagttccggaccgttgtatttttccagccatgccagcgccgtattacccgcacagccattccccagccggctgctggggagatctttggtcagcacgttcactgcgccgtttttacaaataccgtcagcggttaaatccagatccggccatgccccttcgtgaatgcaaatcacgccaggtttaattccctcgctaatgaccgctccggcaagaatttgcccgcgtgcgttccacaaccgaacagtatcgccatcttgtatgccgcgctcctgggcatcgtcaggatgaatggtgacaggctcacgatttgccaccgcgtacaattcgcgcagagaactgtaattcagctggctgtgcaggcggtgcgccggatgggcagaaagtacctgcaactgttctggttcggcattgccctgccattcgtccggctccagccacattggatgcccagggcaatccgggtaaccgtaatcggcaatacgctgactgaagatttcaatcttgccgctggcggtttttaacggatgcgccagcggatcgcggcaaaaatcagcgaagcgaataaaccgctcgctgtccgggttttccggcatctcaattaactggttggcttgccagaactcagcaaatggcggcaattcaacctgctggcttgccccgcgctgtcgggcaacgttataaaacgtttccagccattgcagctcactttttccttccgtaaaacgtgcataaccgcccttctcccagcgttcacttaactcggcaaaaacatcaaaatcattacgcgcttcatagcgtggcggcaccacttgcttcatcggcaccagatgctgattactgtaatcaccggtcatggtgagatcattacgctcaaaagaggtagtcgcaggcagaacgatatccgcgtgttttgccgccgccgtccagaagcattcagagatcaccaccagctccggtttttgccaggcacggatcaggcgattggtatcctgatgatgagtaaagttggcaccgcccgcccaccagataaaacgaatatccgggaaatgtcggttcataccgttgtgttgatatgcgccaccagggttttccagtgcttcaacaatgcgggcaacagggattttatccaccgcatcgcagccacccggcaagctgccctgcatggaagagagcaccgcagaacgccgcgtggggttaccaccattggcaaaatggtaagaaagaccaaaaccgccgccgggtgtgccgatttgccccaacattgctgccagcgtgacgatcatccagtgtttttgctcaccaaactgttggcgctgcattccccagcctgccatcagcatggtggtattttggtggaaaatagccgccagctcgcggattttcgctgcgccaacaccacaaatctctgctgcccattcggcggttttcgctattccgtcactctcgcccagcaaataagaggcgaagacggcataacctgtggtgcaacgcgccagaaacgcttcgtcgtgccaaccattttccaccagcgtatgggcgatccccagcatcagcgcaacatcggtgcccatgtgcggtgccacccactccattttatcgccaaagaaatcgacggtttcgcttcgcattggatcaatgcagatcagctttttcccgctgtcacgcagtgcagaaaagtaagaaagcccctgctcatcggatgcattccacgcaattttcagcgtattgagtgggttagcactccacagcaccacgacatcgctatgttccagcaccagcggccaactggtctgctgttgataaacttcactaccacccacgacatacggcatgatcgcctgtgccgcgccggtgctataatcccccagatgcccggtataaccgcctgccagcgccatatagcgttgtaataatgtgctggccttatgcagcacgccgttactacgccagccgtaggaaccagcaaaaatgcttgccggaccataagcctcacgaatgcgtttatgttgttggtgaataagatccagcgcctcatcccaactcacgcgaacaaattcatcctgcccacgaatgccttgcgggttttccggactcgcaagaaagccttttcgcaccattggaaatcgtacccgcgtattgctgtgaacctggtcgcgaaccgcgctctgcaaggagttttccattcctgtggctaacgcgccacggctgctaaacacggtttcgccgtcggtttcaaccagcatgggcccccaatgggcggcagtcagaacggaatatcgtgaggatgagttggccaaaccgaagactcctgaaaggttagatgtattgagcagttaaatattacttacaaatttccgagtattcccaggaataatcttcatgttcacgcggcataatctcccgccacggaacccgtggcaaagaataaaaaggttattaaggattaacaatgaagaaacgtgtttatcttattgccgccgtagtgagtggcgctctggcggtatctggctgcacaactaacccttacaccggcgaacgcgaagcaggtaaatctgctatcggcgcaggtctgggctctctcgtgggcgcgggtattggtgcgctctcttctagcaagaaagatcgcggtaaaggcgcgctgattggcgcagcagcaggcgcagctctgggcggcggcgttggttattacatggatgtgcaggaagcgaagctgcgcgacaaaatgcgcggcactggtgttagcgtaacccgcagcggggataacattatcctcaatatgccgaacaatgtgaccttcgacagcagcagcgcgaccctgaaaccggcgggcgctaacaccctgaccggcgtggcaatggtactgaaagagtatccgaaaacggcggttaacgtgattggttataccgacagcacgggtggtcacgacctgaacatgcgtctctcccagcaacgtgcggattccgttgccagcgcgttgatcacccagggcgtggacgccagccgcatccgtactcagggccttggcccggctaacccaatcgccagcaacagcaccgcagaaggtaaggcgcaaaaccgccgtgtagaaattaccttaagcccgctgtaatccctttcatgccaggtgatgcagaaatcacctggcattcttcagttttccttcatcatatttcaggctaaggtgatcgccttatcagtgaatggagagaagcatgaagccgtccgttatcctctacaaagccttacctgatgatttactgcaacgcctgcaagagcatttcaccgttcaccaggtggcaaacctcagcccacaaaccgtcgaacaaaatgcagcaatttttgccgaagctgaaggtttactgggtagtaacgagaatgtaaatgccgcattgctggaaaaaatgccgaaactgcgtgccacaagtacgatctccgtcggctatgacaattttgatgtcgatgcgcttaccgcccgaaaaattctgctgatgcacacgccaaccgtattaacagaaaccgtcgccgatacgctgatggcgctggtgttgtctaccgctcgtcgggttgtggaggtagcagaacgggtaaaagcaggcgaatggaccgcgagcataggcccggactggtacggcactgacgttcaccataaaacactgggcattgtcgggatgggacggatcggcatggcgctggcacaacgtgcgcactttggcttcaacatgcccatcctctataacgcgcgccgccaccataaagaagcagaagaacgcttcaacgcccgctactgcgatttggatactctgttacaagagagtgatttcgtttgcctgatcctgccgttaactgatgagacgcatcatctgtttggcgcagaacaattcgccaaaatgaaatcctccgccattttcattaatgccggatgtggcccggtggttgacgaaaatgcactgatcgcagcattgcagaaaggcgaaattcacgctgccgggctggatgtcttcgaacaagagccactgtccgtagatagcccgttgctcagtatggccaacgtcgtcgcagtaccgcatattggatctgccacccatgagacgcgttatggcatggccgcctgtgccgtggataatttgattgatgcgttacaaggaaaggttgagaagaactgtgtgaatccgcacgtcgcggactaagccgcgactgcgtagagtaaagcccgataatcgctcgggcttttactctttattgggttgcagtaactgctgtagtccaggcctgattaaacgcctgatgctgtgccggtaatggcgcaatcagtttgttatattcacttgcctgctgactagtcgggaactggatgccatttgcgacaaagctcacctgagtaccttgctgagcaatgtagtctccaaccatcaccagttgttgcgtgaaagtttgtgccgccggaatcaacggttgcaatgcatcagctggcgtcgttaccactttggtgaatgcctgatcaaagaccggtttcaaatcatcgctctgttttagcgcagagtgcgcagcatcggcctgcaacttcgcattttgcagttgttgcgccagcacacccaggctaccgttcatttcacgcagcggaccgctttgcgtaacgtaatcctgcggtacgcgaattgcgttaacgctgtctacaaccgggcgcagaccggaatccatcgcctgattcacctgctgagaataaccatacagaatcgcgtaatcagagacaaaaggaccaaactgttttttctgatcggcagtcagggttggtagacgttcaccgctacgcatcactgtattctgcaggaagtcgataaacgctttacgctgatcgccttctttatcaaaacacccactcaggctaactaccattaataacgccgcaagaggcgcaaaccagcgagagcaggactttcctgtcgccattttcttactcctttcacccaaaaaaagcgcacaacgacacacgcgtgtctgacgtgacaaggatagtccaggacaggcttgcaggataccctttctacgtaatcttcctggtaaaatcatggagaaaatgaaacaaggttaatttgttgtttcattgttaaaaaatgatagtgccgttgccttttttgtagccagagatttacgccttcgcagaaggttagattttcgaaatctttacaaaacaggagtggtaagagatatatcggcatttatcagatcgttaggtggctataagtcacgctaaatgacaggctgaatcgaatcatagccagagcatgccctgacttcaccccgctgtgtctgcttttcccgactattcttaatgagcttcgatgcaattcacgatcccgcagtgtgatttgaggagttttcaatggaatataaagatccaatgcatgagctgttgagcagcctggaacagattgtttttaaagatgaaacgcagaaaattaccctgacgcacagaacaacgtcctgtaccgaaattgagcagttacgaaaagggacaggattaaaaatcgatgatttcgcccgggttttgggcgtaagtgtcgccatggtaaaggaatgggaatccagacgcgtgaagcctagtagtgccgaactaaaattgatgcgtttgattcaagccaacccggcattaagtaagcagttgatggaataaacttttatccactttattgctgtttacggtcctgatgacaggaccgttttccaaccgattaatcataaatatgaaaaataattgttgcatcacccgccaatgcgtggcttaatgcacatcaacggtttgacgtacagaccattaaagcagtgtagtaaggcaagtcccttcaagagttatcgttgatacccctcgtagtgcacattcctttaacgcttcaaaatctgtaaagcacgccatatcgccgaaaggcacacttaattattaaaggtaatacactatgtccggtaaaatgactggtatcgtaaaatggttcaacgctgacaaaggcttcggcttcatcactcctgacgatggctctaaagatgtgttcgtacacttctctgctatccagaacgatggttacaaatctctggacgaaggtcagaaagtgtccttcaccatcgaaagcggcgctaaaggcccggcagctggtaacgtaaccagcctgtaatctctgcttaaaagcacagaatctaagatccctgccatttggcggggatttttttatttgttttcaggaaataaataatcgatcgcgtaataaaatctattattatttttgtgaagaataaatttgggtgcaatgagaatgcgcaacgccgtaagtaaggcgggaataatttcccgccgaagactcttactctttcaatttgcaggctaaaaacgccgccagctcataactctcctgtttaatatgcaattcacacagtgaatctcttatcatccaggtgaaaaataaaagcgtgaaacaaatcactattaaagaaagtaatctatatttctgcgcattcccagcctcctgtgttgatttccaacgagtataactttgatttatagtcaggtggggcttttctctgtctgcctttcggtgaatacctgagacaaacagtctcaagcacccgtggctattctagcttaataagtttgtttcttctccttgatataatcctaaaaaaatctcataaaattaatatatgagataatctttattcagcagaagattattaaaggttgctgtattatttagcgataaaaaaagcctgccagatggcaggctatttaataacggcgttattattgcaacaggctaatatccgcaacgcgcaggaacagttcgcgcagtttctccagcatggtcagacggttgatacgcaattctttgtcatcaaccatgaccatcactttatcgaagaaagcatcaaccggttcacgcagctcagccagttcgaccagcgcatcctggtaacgaccttccgtaaagtacggctccagcttgtcacgtagcaccacaacctgcatcgccagtttaatttcttccggctctttcagggtagaggcattcacgcggtcgctcagcacttcgtcagatttcgccagaatgttagatacacgtttgttcgccgccgccagtgcagcagctgcatccagggtacggaaatggcttaccgctttcatacgggcatcgaaatcagccggacgagtcggacgacgcgccagtaccgcctggatggtgtcaacggtataaccttcgtcctgataccaggcgcggaagcgaccgagcataaagtcgataacatcatcaactacgttggcattagtcagcttatcgccatacagacgcaccgcttcttcggtcagcgtttgcagatcaaggttgaggttcttctcaacgataattcgcagcacgccaagcgcggcacgacgcagcgcaaacgggtctttgtcgcctttcggatgctgaccgataccgaagatacccgccagggtatccatcttgtcagcaatcgccagcgcacaagctactgggttggacggcaggtcatcaccagcaaaacgcggctgatactgctcattcagcgccaccgcgacatcttccgcttcgccatcgtgacgcgcatagtgcatccccataacgccctgggtgtcggtgaactcgaagaccatgttggtcatcaggtcgcacttagacagcagacccgcacgggtagcgtggttaacgtcagcgccaatctgttcagcaatccagccagccagcgcctggatgcggtcagttttgtcgcgcagcgtccccaactgttgctggaacaacacggtttgcaggcgcggcaggttatcttcaagacgttttttacggtcggtgttgaagaagaactcggcatccgccagacgcggacgaacgactttctcgttaccggagataatctgctgcggatctttgctttcgatgttggcaacgaagataaagttcggcagcagtttgccgtcgttcgcatacaccgggaagtatttctggtcacctttcatggtgtaaaccagcgcttcagccggcaccgcgaggaatttctcttcgaattttgcggtcagaacgaccggccactccaccaggctagccacttcttccagcaggctttcgcttaagtcagcgttaccgccaatcttacgcgctgcttcttcggcatcggctttaatcttcgccttacgttcttcgtaatcggcgatgactttcccacgctcacgcagaatttccggatactgatcggcgttatcgatggtgaattccggctcgcccataaagcggtggccgcgaatcacgcgatcggactgaatgcccagaatggttgccggaatgactttgtcgcccagcagcagggtcacggtgtgcaccggacgcacgaagtgcacgtcgcttgcgccccaacgcatcagtttcgggatcggcagtttcgccagagaagtcgcaaccatattcggcagcagtgcttcggtgctttcgcccttcacatgggcgcgatacagcagccattcgcctttatcggtagtcagacgctcagcctggtcaacggtaataccgcaaccacgcgcccaaccttctgccgctttgctcggtttgccttcagcgtcgaacgcctgggcaatcgccgggccgcgtttttcgatttcacgatccggttgcgcttccgccaggttagctactttcagcgccagacgacgcggagcagcaaaccattgaacggtgccgtgtgcgaggccagcgttatccagctccgcagtaaagttcgcagcaaaggactcagccaggctgcgcagtgcttttggtggcagctcttcagtgccgatttccaccagaaaagttttctcagacatagccgcctcttacttatctttgttgcacatcgggaagccgagggcttcacgggaagcgtagtatgcttctgccactgctttggtcagggtgcgaatgcgcagaatgtagcgctgacgctcggtgacggagatggctttacgcgcatccagcaggttgaagctgtgggcggctttcagaatacgctcgtaggctggcagcggcagcggattttccagcgccagcagctgctgcgcttctttctcgtactgctcgaagcaggtgaacaggaagtccacatccgcgtattcgaagttgtaagtggactgctccacttcgttctgatggaacacgtcgccgtaggtggttttacccagcgggccgtcgctccagaccaggtcgtaaacgctgtctacgccctgaatgtacatggccagacgttccagaccgtaggtgatctcgccggtaaccggtttacactccagaccaccaacctgctggaagtaagtgaactgcgtcacttccatgccgttcagccacacttcccagcccagtccccaggcacccagcgtcgggttttcccagttatcttccacgaaacggatgtcgtgaatagtcgggtccatgcccagctctttcagagaaccgaggtacagctcctgaatattgtccgggcttggcttaatgaccacctggaactgatagtagtgctgtaaacggttggggttttcgccgtagcgaccatcggtcgggcgacgagaaggctgaacataagcagccgccatcggttctggccccagctcgcgcagacaggtcattgggtgagaggttcccgcgccgacttccatgtccaatggttgaacaatggtgcagccctggcgagcccagtaatcctgtaaggtcaggatcaagccctggaaggtcctggtatcaaacttttgcatattatttcgtgctggatacgtgtggatttaaaggaagggatcagtatacccgctggatggaagatatacagtacgaaacgggaaaaagcagggcttaacgcatggaaagatgcaaaaaatggccatccgcgtcaaaagaacagacaaactgctctttacggaaggtataaccgcgcatttcatagcttccctggaactgttcgaaggcggtgacgtcgattttttgctcgccggtgttataacgttttgccgcctgatccttgcataacgcttccatattcaagctacgcagaggatcaacctttacccgttgtgctttctgcacgggactcggtatagaacaacccactagcaccataagcgccattgccggaaagaaagcgttcatcatcattaaattaccgtctggtttgcaggtgagtcttattatttatatcggtatagtggctgatatcttacgaatttccttaagcctctataagctgtagtgataaaactcagattattccagtgcgccaaccaaatgatttatcggtcagactttttttaaccagatacagagacacagatgcagcccaaaatttactggattgataacctgcgagggatagcgtgtttaatggtggtgatgattcacaccactacctggtatgtgaccaatgctcatagtgttagccccgtcacatgggatatcgccaatgttctgaattctgcctctcgtgtcagcgtgccgctatttttcatgatttccggctatctcttttttggcgaacgcagcgcccagccgcgccatttcttgcgtatcggcttatgtctgattttttatagcgcaatcgcactgctctacattgcgctgtttacctccatcaatatggagttagcgctgaaaaacctgctgcaaaagccagtgttttaccacttgtggtttttcttcgcgattgcggtgatttatctggttagtccgctgattcaggtgaagaacgtcggcggaaaaatgttgctggtgctaatggcggtgattggcattatcgctaacccaaacacagtgccgcagaaaattgacggttttgaatggctgccaattaacttatatatcaatggcgatactttttactacattctgtatggcatgttgggccgcgctatagggatgatggacacacagcataaagcactgagctgggtgagcgccgcgctgtttgcgacgggggtttttattatctctcgcgggacattatatgaattgcagtggcgcggaaattttgccgatacctggtatctttactgtgggccgatggtttttatctgcgcaatcgcgctattgactctggttaaaaacacgctggatacgcgtaccattcgcggacttggcttaatctcccgccatagtttgggtatatacggattccacgccttgattatccatgcgctgcgcacccggggaattgagcttaaaaattggccaatactggatattatttggatcttttgcgcgacgttggcagcgagtttgttactttctatgctggtacaacgaatcgacagaaacagattagtgagttaagtaaaagcccggtcacattggactgaccgggcttacgtgagttattcgctgtattcttcctgggtaacctgtgtttcttttggtgggtttattccggcatcacgaatatttttctgcaccgctactgcaccaaacaagcttaagaagaaagccagtccataaaaacctttttcgctgagtaataatgtcgcattccacagacctaccatcagtaatgcaacagagataataaagacagtcaggcaggtcatataataaatggaagtggtcggtatgccttcatacttgtcccgaacggtcttttgataagacgccgcagaaaacagtcctaataccagtacggcaaaataatatcctttttcatttaactgcatctctgcattccatagccctaacagataggtaacgataccaccaacgagagctatccaactcacaatactaaaggccggactataggtacttattttgttgtccatcacagtattcctttcattcctgaatatgtaagagctttatgttgctcatgcgctgcgaaacaaacgcatttgaccaaacaagcagacaaaaaaggcgatgggatagatcaccatttcataagtattgataggtgcgtttaaaacaccgataaacaagagaccgatagtgattaacgcaactaactggcagatatgggtaaaaaaatcatccagttgcccgagtttttctgcgcgaagatatgcatagttgccaaaagttgctgtcattaacacgccaagaaaatagccttttccacttaacaatgggcaactgatccatagcccaaccagataaaccagcgccccgacaacaaataatagtttcgccacagtcttactggttttcataacgatctccatatctaccagcgatacattacgagtaaccaacgaaagacaaaactgaaaaatgccattaacaaatgattttcagaataaattcatactaaatattaattaattactgagatatatagatgtgaattatcccccacccggtcaggcaggggataacgtttacgccattaatggcagaagttgctgatagaggcgacggaacgtttctcgtcgtggctgataagcggcataacgctgcgcatctggtagatggctctgttctaacggtagttgcggcaacaattcaatgaggcttttctctggattcgccgcgatctgcgccagccttgctgcgcccagtgctggccccacatccccccccgtacggtaatcgagctgctgaccgctgatatccgccagcatctgacgccagtactcactacgcgccccgcccccaatcaacgtaacactttgcggtttaataccgcaggcatgcacgacatccatgccatctgccagcgcataacccacgccttccagcactgctcgcgccagttcattggggccatgttgatgagtcaaaccaaagaaaacccccttcgcctggggattattgtgtggcgtacgctcgccggaaagataaggcagaaaccaaactggctcggcactttcatcagcctgttgagctgcagcgattaaagctgggacattgctcaggccggttaatttcgcggcccaatccagacagctcgctgcactcagcatcacagacattaaatgccaacgttgcggtagcgcatggcaaaagctatgtacggcgctttctggcttgcttaagaacccttcgctgacagcaaaatagaccccgctcgtccccaggcttaacattgcctgattagcatcaaccattcccacaccaactgcaccagctgcattgtcgccaccgcctgcgacaactggcaccgtcgccataccccacgctttcgcaacttcaggtaacaaagcaccagtaatttcgctgccttcgtataatgcgggcatctggtcacgagataagtcgcaagcctgcagcatgacgtcactccagtcacgctttgcgacatccagccacatggtgccagctgcgtcagacatatcgctggcaaactcccccgtcatacgcagacgcaagtaatctttcggtaataatactttgtcgatttgacggaatatctccggctcatgccgctgaacccatagcaatttaggcgcagtaaatccgggcatcatcaggttgccggtaatcacccggctttgcggaactcgcgcttccagcaaagtgcactcttgcgcacagcgcccgtcgttccacaaaatggcagggcgtaacacccgttgctgagcatccagcaaggttgctccgtgcatctggccggcaatacccaatgctttaacgtcctgcagagaatgctgatcgcccagagctttcattgcgcgatcagttgcctgccaccactgttccgggtcttgttcgctccagagtggatgcgggcggctaacggtcagcttttccgtttgcgcagcaaccacctcaccctgctcgttgagcaaaataacttttacgccgctggtgccaagatctatcccgatatacatatcgatcgttccttaaaaaaatgcccggtatcgctaccgataaccgggccaacggactgcacagttagccgttatttgtcgaacagataatggtttaccagattttccagttgttcctggcgaccactctgatgcaccggagacaaatgatgttcctgagcatatttggctaaatctgccagactcatttggcctttcaggatttgctggcccaattcgctattccagccggaataacgctgcgcgatgcgtttatccagctcgccatcttcaatcatgcgcgctgcaattttcagcgccagtgccatcgtatccatcgcgccgatatgaccgtaaaacagatcatatttatcagtactttgacgacgtactttggcatcgaagttcagaccaccggtggtgaaaccgcctgctttgagaatttcatacatcaccagcgcattctcttccacactgttcgggaactggtcggtgtcccagcccagttgcgcatcgccacggttggcgtcgacagaaccgaacaggccaagcgcaatggcggtggctatttcatgatggaaagagtgacctgccagcgtcgcgtggttagcttcaatgttcagtttaatctctttttccagaccaaactgtttcaggaagccatagaccgtcgcggcatcgtaatcatattgatgtttggtcggttcttgcggtttcggttcgataagcaacgtgccctggaaaccgattttatgtttatgctcaaccaccatctgcataaagcggcccagttgttcacgctcctgacgcaagtcggtatttaacagcgtttcgtaaccttcacgaccgccccacaggacatagttttcaccgcccaatttatgggttgcttccatcgctgtaacaacttgcgttgccgcccagctgaagacttcaggatctgggttcgtcgccgcacccgcgccgtagcgagggtttgtaaagcagttggccgttccccacagcagcttcacgccgctctcttcttgcttgcctgccaggacatcaaccatttgcgcaaaattattgatgtactcttttaagctcgcgccctcaggggaaacatccacatcgtggaagcaataaaatggcacatgtaacttgtggaaaaactcaaatgcgacatctgctttacgcttcgccaacgccagtgcctcaccaggctgctgccacggacgattaaacgcccccacaccaaacatatccgccccgttccagcagaaggtgtgccagtagcaggcggcaaaacgcaagtgctcttccatacgcttacccaacaccagttcgtcgggattgtagtgacggaatgctaacgggttactggatttactgccttcataacgaacgcgatcgagctggtcaaaataggcttgcatattgaactccataatcaggtaatgccgcgggtgatggatgatgtcgtaatattgggcactccctttcagttgctcaattatgttatttcacactgctattgagataattcacaagtgtgcgctcgctcgcaaaataaaatggaatgatgaaactgggtaattcctcgaagagaaaaatgcaataagtacaattgcgcaacaaaagtaagatctcggtcataaatcaagaaataaaccaaaaatcgtaatcgaaagataaaaatctgtaattgttttcccctgtttagttgctaaaaattggttacgtttatcgcggtgattgttacttattaaaactgtcctctaactacagaaggccctacaccatgaaaataaagaacattctactcaccctttgcaccagtctcctgcttaccaacgttgctgcacacgccaaagaagtcaaaataggtatggcgattgatgatctccgtcttgaacgctggcaaaaagatcgagatatctttgtgaaaaaggcagaatctctcggcgcgaaagtatttgtacagtctgcaaatggcaatgaagaaacacaaatgagccagattgaaaacatgataaaccggggtgtcgatgttcttgtcattattccgtataacggtcaggtattaagtaacgttgtaaaagaagccaaacaagaaggcattaaagtattagcttacgaccgtatgattaacgatgcggatatcgatttttatatttctttcgataacgaaaaagtcggtgaactgcaggcaaaagccctggtcgatattgttccgcaaggtaattacttcctgatgggcggcagcccggtagataacaacgccaagctgttccgcgccggacaaatgaaagtgttaaaaccttacgttgattccggaaaaattaaagtcgttggtgaccaatgggttgatggctggttaccggaaaacgcattgaaaattatggaaaacgcgctaaccgccaataataacaaaattgatgctgtagttgccagtaacgatgccaccgcaggtggggcaattcaggcattaagcgcgcaaggtttaagtgggaaagtagcaatctccggccaggatgcggatctcgcaggtattaaacgtattgctgccggtacgcaaactatgacggtgtataaacctattacgttgttggcaaatactgccgcagaaattgccgttgagttgggcaatggtcaggaaccaaaagcagataccacactgaataatggcctgaaagatgtcccctcccgcctcctgacaccgatcgatgtgaataaaaacaacatcaaagatacggtaattaaagacggattccacaaagagagcgagctgtaagcgttacgccccagcgcggagcgggggcgtgatttctctccatgccgcgtgaatgaattggcttaggtggagtcgttatgccttatctacttgaaatgaagaacattaccaaaaccttcggcagtgtgaaggcgattgataacgtctgcttgcggttgaatgctggcgaaatcgtcagtctttgtggggaaaatgggtctggtaaaagtacgctgatgaaagtgctgtgtggtatttatccccatggctcctacgaaggcgaaattatttttgcgggagaagagattcaggcgagtcacatccgcgataccgaacgcaaaggtatcgccatcattcatcaggaattggccctggtgaaagaattgaccgtgctggaaaatatcttcctgggtaacgaaataacccacaatggcattatggattatgacctgatgacgctacgctgtcagaagctgctcgcacaggtcagtttatccattagtcctgatacccgcgttggcgatttagggcttgggcaacaacaactggttgaaattgccaaggcacttaataaacaggtgcgcttgttaattctcgatgaaccgacagccagtttaactgagcaggaaacgagcattttactggatattattcgcgatctacaacagcacggtatcgcctgtatttatattagccacaaactcaacgaagtcaaagcgatttccgatacgatttgcgttattcgcgacggacagcacattggtacgcgtgatgctgccggaatgagtgaagacgatattatcaccatgatggtcgggcgagagttaaccgcgctttaccctaatgaaccacataccaccggagatgaaatattacgtattgaacatctgacggcatggcatccggttaatcgtcatattaaacgagttaatgatgtcagcttttccctgaaacgtggcgaaatattgggtattgccggactcgttggtgccggacgtaccgagaccattcagtgcctgtttggtgtgtggcccggacaatgggaaggaaaaatttatattgatggcaaacaggtagatattcgtaactgtcagcaagccatcgcccaggggattgcgatggtccccgaagacagaaagcgcgacggcatcgttccggtaatggcggttggtaaaaatattaccctcgccgcactcaataaatttaccggtggcattagccagcttgatgacgcggcagagcaaaaatgtattctggaaagtatccagcaactcaaagttaaaacgagctcccccgaccttgctattggacgtttgagcggcggcaatcagcaaaaagcgatcctcgctcgctgtctgttacttaacccgcgcattctcattcttgatgaacccaccaggggtatcgatattggcgcgaaatacgagatctacaaattaattaaccaactcgtccagcagggtattgccgttattgtcatctcttccgaattacctgaagtgctcggccttagcgatcgtgtactggtgatgcatgaagggaaactaaaagccaacctgataaatcataacctgactcaggagcaggtgatggaagccgcattgaggagcgaacatcatgtcgaaaagcaatccgtctgaataacgcattgaggagcgaacatcatgagcaaaagcaatccgtctgaagtgaaattggccgtaccgacatccggtggcttctccgggctgaaaagtctgaatttgcaggtcttcgtgatgattgcagctatcatcgcaatcatgctgttctttacctggaccaccgatggtgcctacttaagcgcccgtaacgtctccaacctgttacgccagaccgcgattaccggcatcctcgcggtaggaatggtgttcgtcataatttctgctgaaatcgacctttccgtcggcagtatgatggggctgttaggtggcgtcgcggcgatttgtgacgtctggttaggctggcctttgccacttaccatcattgtgacgctggttctgggactgcttctcggtgcctggaacggatggtgggtcgcgtaccgtaaagtccctagttttattgtcaccctcgcgggcatgttggcatttcgcggcatactcattggcatcaccaacggcacgactgtatcccccaccagcgccgcgatgagtcaaattgggcaaagctatctccccgccagtaccggcttcatcattggcgcgcttggcttaatggcttttgttggttggcaatggcgcggaagaatgcgccgtcaggctttgggtttacagtctccggcctctaccgcagtagtcggtcgccaggctttaaccgctatcatcgtattaggcgcaatctggctgttgaatgattaccgtggcgttcccactcctgttctgctgctgacgttgctgttactcggcggaatgtttatggcaacgcggacggcatttggacgacgcatttatgccatcggcggcaatctggaagcagcacgtctctccgggattaacgttgaacgcaccaaacttgccgtgttcgcgattaacggattaatggtagccatcgccggattaatccttagttctcgacttggcgctggtagtccttctgcgggaaatatcgccgaactggacgcaattgcagcatgcgtgattggcggcaccagcctggctggcggtgtgggaagcgttgccggagcagtaatgggggcatttatcatggctagtctggataacggcatgagtatgatggatgtaccgaccttctggcagtatatcgttaaaggtgcgattctgttgctggcagtatggatggactccgcaaccaaacgccgttcttgattttgataaaaattttctcaaagccggttacgtattaccggttttgagtttttgcatgattcagcaggaaaagaaccatgtttactaaacgtcaccgcatcacattactgttcaatgccaataaagcctatgaccggcaggtagtagaaggcgtaggggaatatttacaggcgagtcaaagcgaatgggatattttcattgaagaagatttccgcgcccgcattgataaaatcaaggactggttaggagatggcgtcattgccgacttcgacgacaaacagatcgagcaagcgctggctgatgtcgacgtccccattgttggggttggcggcagctatcaccttgcagaaagttacccacccgttcattacattgccaccgataactatgcgctggttgaaagcgcatttttgcatttaaaagagaaaggcgttaaccgctttgctttttatggtcttccggaaagtagcggcaaacgttgggccactgagcgcgaatatgcatttcgtcagcttgtcgccgaagaaaagtatcgcggagtggtttatcaggggttagaaaccgcgccagagaactggcaacacgcgcaaaatcggctggcagactggctacaaacgctaccaccgcaaaccgggattattgccgttactgacgcccgagcgcggcatattctgcaagtatgtgaacatctacatattcccgtaccggaaaaattatgcgtgattggcatcgataacgaagaactgacccgctatctgagccgtgtcgccctttctagcgtcgctcagggcgcgcggcaaatgggctatcaggcggcaaaactgttgcatcgattattagataaagaagaaatgccgctacagcgaattttggtcccaccagttcgcgtcattgaacggcgcagtacagattatcgcagcctgaccgatcccgccgttattcaggccatgcattacattcgtaatcacgcctgtaaagggattaaagtggatcaggtactggatgcggtcgggatcagccgctccaatcttgagaagcgttttaaagaagaggtgggtgaaaccatccatgccatgattcatgccgagaagctggagaaagcgcgcagtctgctgattagtaccaccttgagcatcaatgagataagccaaatgtgcggttatccaagcctgcaatatttctactctgtttttaaaaaagcatatgacacgacgccaaaagagtatcgcgatgtaaatagcgaggtcatgttgtaacgatgatgagaattgtcggcgtcacatcaggtaacgctgcgtggttgtcggatgcggcgtgaacgccttatccgacctacccgccaggcatgataaaacgcaccaacaacgcttcaggctcgtagctcaactgcctgagacaaagtaaaaagccttatccgactgacaagtcggataaggctcaaggaaatgcaattacatatgcgccgcgattaaccgttggttatcctggtacattgcgaacaggtagttgttataactcttccctttggtgctgtagcccttcagcttgtgaatcatcgctgtggcagtcacttcctgatccgctttacgcagctgcgcacggcttttacggaagctagagtaagccgggtgcgtattcaggttagtgacataggcgctcacgctttctttgacagaactaaactgactgtaccctttcactttacctggcgcattggtacaacgtcctttcatgcatttcatgccgaacaggttgttgttgttgcgcgccagcttgctcgttccccaaccgctttctgctgcagccatcgtcgccaccatactggtggggataatgtctacgcgttcaagcaaggtattccacgggatttttcgcgtattaccggaccacttcaccttgtagcgtttggcgatgtctttcagacgcgcacgctcagcaggactccattggccctgatactgtttactaatgagccagttacgttccgcagtaatggccgcattttggctggtaatgtaaggcattacggtccggagaaacgcctttttccttggtgttccggaagggtattttcgcaaatcaggaagactactactctttgcactattgcgagaatactcttgtttactgcttacctgtttattactagctttagttaagtgggacttttgactcgctgttgttgtgtgcgtcttcgctaacacctcactgctaaacaccagagtgagtaacataagaatcatcgccccatatcgtcgtatgggagtcaaaatcatcaggtctcctggtcggatttaatcattccaacaccttatatttttcacaaatttgagagttgaatctcaaatcatatcaaaaatagctgtcaagagcaccccaaggaatagtccaaatctgaaactatgtcacgtgttaacgattcagattggcgctaaatcgcagaaaatgtgggggttatcgcaaaattcagccgttttttgcgcgagatcgctcacccttgcttctcatcctgtggacttaccgctcagggatgagttttgtttggcttatcgctggcaaactgtctgaaatcgcagcaataaggactcatccgccatgaaactcgccgcctgttttctgacactccttcctggcttcgccgttgccgccagctggacttctccggggtttcccgcctttagcgaacaggggacaggaacatttgtcagccacgcgcagttgcccaaaggtacgcgtccactaacgctaaattttgaccaacagtgctggcagcctgcggatgcgataaaactcaatcagatgctttccctgcaaccttgtagcaacacgccgcctcaatggcgattgttcagggacggcgaatatacgctgcaaatagacacccgctccggtacgccaacattgatgatttccatccagaacgccgccgaaccggtagcaagcctggtccgtgaatgcccgaaatgggatggattaccgctcacagtggatgtcagcgccactttcccggaaggagccgccgtacgggattattacagccagcaaattgcgatagtgaagaacggtcaaataatgttacaacccgctgccaccagcaacggtttactcctgctggaacgggcagaaactgacacatccgcccctttcgactggcataacgccacggtttactttgtgctgacagatcgtttcgaaaacggcgatcccagtaatgaccagagttacggacgtcataaagacggtatggcggaaattggcacttttcacggcggcgatttacgcggcctgaccaacaaactggattacctccagcagttgggcgttaatgctttatggataagcgccccatttgagcaaattcacggctgggtcggcggcggtacaaaaggcgatttcccgcattatgcctaccacggttattacacacaggactggacgaatcttgatgccaatatgggcaacgaagccgatctacggacgctggttgatagcgcacatcagcgcggtattcgtattctctttgatgtcgtgatgaaccacaccggctatgccacgctggcggatatgcaggagtatcagtttggcgcgttatatctttctggtgacgaagtgaaaaaaagcctgggtgaacgctggagcgactggaaacctgccgccgggcaaacctggcatagctttaacgattacattaatttcagcgacaaaacaggctgggataaatggtggggaaaaaactggatcagaacggatatcggcgattacgacaatcctggattcgacgatctcactatgagcctagcctttttgccggatatcaaaaccgaaagtactaccgcttctggtctgccggtgttctataaaaacaaaatggatacccacgccaaagccattgacggctatacgccgcgcgattacttaacccactggttaagtcagtgggtccgcgactatgggattgatggttttcgggtcgataccgccaaacatgttgagttgcccgcctggcagcaactgaaaaccgaagccagcgccgcgcttcgcgaatggaaaaaagctaaccccgacaaagcattagatgacaaacctttctggatgaccggtgaagcctggggccacggcgtgatgcaaagtgactactatcgccacggcttcgatgcgatgatcaatttcgattatcaggagcaggcggcgaaagcagtcgactgtctggcgcagatggatacgacctggcagcaaatggcggagaaattgcagggtttcaacgtgttgagctacctcagcagccatgatacccgcctgttccgtgaagggggcgacaaagcagcagagttattactattagcgccaggcgcggtacaaatcttttatggtgatgaatccagccgtccgttcggtcctacaggttctgatccgctgcaaggtacacgtagcgatatgaactggcaggatgttagcggtaaatctgccgccagcgtcgcgcactggcagaaaatcagccagttccgcgcccgccatcccgcaattggcgcgggcaaacaaacgacacttttgctgaagcagggctacggctttgttcgtgagcatggcgacgataaagtgctggtcgtctgggcagggcaacagtaacttttccggcttcccgttcgtcagtacctcgggaagccgccaaccaggataaaatgtcagccctaatcagcgttgcaggataaagcaccgctcactcttcaacagaccgatttgcaccccagcaaatgtagcgttattgttaccttccttgctacagagttcgacagatatcccgctatgacattctccctttttggtgacaaatttacccgccactccggcattacgctgttgatggaagatctgaacgacggtttacgcacgcctggcgcgattatgctcggcggcggtaatccggcgcagatcccggaaatgcaggactacttccagacgctactgaccgacatgctggaaagtggcaaagcgactgatgcactgtgtaactacgacggtccacaggggaaaacggagctactcacactgcttgccggaatgctgcgcgagaagttgggttgggatatcgaaccacagaatattgcactaacaaacggcagccagagcgcgtttttctacttatttaacctgtttgccggacgccgtgccgatggtcgggtcaaaaaagtgctgttcccgcttgcaccggaatacattggctatgctgacgccggactggaagaagatctgtttgtctctgcgcgtccgaatattgaactgctgccggaaggccagtttaaataccacgtcgattttgagcatctgcatattggcgaagaaaccgggatgatttgcgtctcccggccgacgaatccaacaggcaatgtgattactgacgaagagttgctgaagcttgacgcgctggcgaatcaacacggcattccgctggtgattgataacgcttatggcgtcccgttcccgggtatcatcttcagtgaagcgcgcccgctatggaatccgaatatcgtgctgtgcatgagtctttccaagctgggtctacctggctcccgctgcggcattatcatcgccaatgaaaaaatcatcaccgccatcaccaatatgaacggcattatcagcctggcacctggcggtattggtccggcgatgatgtgtgaaatgattaagcgtaacgatctgctgcgcctgtctgaaacagtcatcaaaccgttttactaccagcgtgttcaggaaactatcgccatcattcgccgctatttaccggaaaatcgctgcctgattcataaaccggaaggagccattttcctctggctatggtttaaggatttgcccattacgaccaagcagctctatcagcgcctgaaagcacgcggcgtgctgatggtgccggggcacaacttcttcccagggctggataaaccgtggccgcatacgcatcaatgtatgcgcatgaactacgtaccagagccggagaaaattgaggcgggggtgaagattctggcggaagagatagaaagagcctgggctgaaagtcactaaaaattgcctgatgcgctacgcttatcaggcctacatgatttctgcaatatattgaatttggaagaatttgtaggccggataaggcgtttacgccgcatctggcataaacaaagcgcactgttccggcgttgagaaacgccggaaaacgtttcaaacaggctgctgccgtagccgatgccgctgcactttctcgacatccatgcactgcaacgcctttgtcgggcaggcttcaacacaggccggtcccgtctcccgatgccagcacagatcgcacttaatcgccctcgcctttttgcggctagaaacgacctccatcgcaccaaacgggcaagccagcatacagcttttacagccaatgcaacgtgtttgttcaacgaaaatatgcccatgttcgcggcttatcgcgtcaacagggcagacattcgcgcacggtgcatcttcacactgatgacaggctactgccgtggtccagcagtggtctttaatgacacgaatacgggaaataaactcgtctggactcaacgcagcgcaatcctgattctcatgatggctcactgcgcaagccacttcacaggtacggcaaccgatacatttcgtcgcatccgcaataataaaccggttcatgatcactcctttgcactaaaacagcagagtgccagagagcgcgtccctactgctttgatccaacgaaggaaatgttaaagttttggcacttgtccaaagcgttatgtgatcgcgcccaggtcatccctgacagtaaatcccagttcattagaaatagcctgcgcggtttcacgcagtggtttcaggagatttttctctcccacctgtttcagacgacttgtgctaaggctaatgctcacggcgtacggcacccgcccatgaatatcaaacaccggaacagcaatacaggagacgccgagttcgttttcttctctgtccatcgccgctccgctttcacgaatgtgcgccagttcgtcgaacatcgcgggcagctcggtaatggtattgcgggttaacggctggatctcatgctgatggctttcccagtaactcttcacgtagtccgggtgaccaaacgccatgtagatcttgcccattgcggaacagtagagcggcatatgctggccaatataggcacgggttcgcagcatcccggttgtgggttccagcttataaatcaaaatagcgtgatcgtcttcgcggctggagaagttaatggtttcaccagtggcgatgttcagtgcctcaagatgcggagcggcgatatgaatgatattcaggctagacagcgccttctgcccgacggcaataaatttggtggtcaggcgataactccctgcggcaggcgcggtggtcacatagccgcaggactgtaatccctgcaataagcgatggacggtactcttatttaaaccagccagctcgctaagatgcgccaacggacaaccgtttggatagttgctcaaaatctcaatcagcatcaacccgcgaaacagactctggcttccggctggacgctctttttcctgcgccatctcgttctctttttttcccatcacttctttccccattttgtcgcgtcctgatggtagcgcaaagtgtgccgtagttcacgatctcgacagataatttataaccaattgatttttatgtcttttgaaattcatcaatcagattgccttgttaaaaagtgatcgatatatttgaaatcaagtttcgcatattgaaattttaagccaaaaaagcgatcaaaaaaacaaggaagcctgggatgaaagtgacatttgagcagttaaaagcagcctttaatcgggtcttaattagtcgcggcgttgacagcgaaacggctgacgcctgtgcagagatgttcgcccgcaccaccgaatccggcgtttattctcacggcgttaatcgtttccctcgtttcattcaacaactggaaaacggcgatatcattcctgatgcccaacccaaacgtataaccagcctcggcgcaattgaacagtgggacgcccagcgtagcatcggtaacctgacagcgaaaaagatgatggatcgcgccattgaactggctgccgatcacggtattggtctggtggcactacgtaatgccaaccactggatgcgcggcggcagctacggctggcaggcggcggaaaaaggctatattggcatttgctggaccaactccatcgccgtaatgccgccgtggggcgcaaaagagtgtcgcataggcactaacccgctgatcgtcgccattccttccacgccgatcaccatggtcgatatgagcatgagcatgttctcttacggcatgttagaagttaaccgtctggcaggtcgtcagctcccggtcgatggtggctttgatgatgagggcaatttgaccaaagaacctggcgttatcgagaagaatcgccgcattttgccgatgggctactggaaaggttctggcatgagcattgtgctggatatgatcgctactctcctttccgacggcgcatccgttgccgaagtcacccaggacaacagcgacgaatacggcattagtcaaatttttattgccattgaagtggacaagcttatcgacggtcccacccgcgatgccaagctgcaacgcatcatggattacgttactagtgccgagcgtgctgacgaaaatcaggccattcgcttacccggccatgaatttactaccctgctggccgaaaaccgccgtaacggcatcactgttgatgacagcgtgtgggccaaaatccaggcgttatgaggagataagtcatgatttttggacatatcgcgcagcccaatccgtgccgtttgcccgccgccattgaaaaggcgctcgattttctgcgcgctaccgatttcaacgccctggagccgggcgttgtcgaaatcgacggcaaaaatatttatacgcaaattatcgatttaaccacacgcgaagcggtggtaaaccgtccggaagtgcatcgtcggtatatcgatattcagtttctggcgtggggcgaagagaaaatcggcattgctattgatacgggaaataataaagtcagcgaaagtctattagagcagcgcaatattattttttatcacgacagtgaacatgaaagttttatagaaatgataccgggcagctacgcaattttctttccgcaggatgttcaccgaccaggttgtattatgcaaacagcctctgagatacgaaaaattgtggttaaagtcgcattaacggcgctgaattaatcgaataatcgtctacgccagaacgcctgggtaatgttattgctctaactatattaataattcaggttgctgcacatgcgacttgaattatgacagacatagcctcaaggaatagctatgaaaaaaatactcgaagcaatactggcgattaatctcgccgtactttcctgtattgtatttataaacattattttaagatatggttttcagacaagcattttatctgttgatgaattgagtcgttatttatttgtctggttaacgtttattggcgcgattgtagcttttatggataacgcccacgttcaggtcacctttctggtggagaaactctcccccgcatggcagcgacgagtcgctctggttacccattccttaatcttatttatttgtggcgcactggcctggggcgcaacgctaaaaacaattcaggactggagcgattatagtccgatcctcggtttacccatcggcctgatgtatgccgcttgtctgcccaccagcctcgttatcgcattctttgaactgcgtcatttatatcaactcatcacgcgtagcaattctctaacgagcccaccgcaaggagcttaatcatggctgtgctgatttttctgggctgtctgttgggtggtattgctatcggtttgcctattgcctgggcactgttgttgtgcggggcggcgttaatgttctggctggacatgtttgatgtccagatcatggcacaaacgctggtgaacggagccgatagcttctccctgctggcgattccgttctttgtgctggcgggtgaaatcatgaatgcgggcggcttgagtaaacgcattgttgacctgccgatgaaactggtggggcataaaccaggcgggctgggctacgtcggcgtgctggcagctatgattatggcgagcctttctggttctgccgttgcggataccgccgccgttgccgctctactggtgccgatgatgcgcagcgccaactatccggtcaaccgggcggcggggctgattgcctctggcggcattatcgcgccaattattcccccttccattccgtttattatcttcggcgtttccagcggattatccatcagtaagctgtttatggcgggcattgcccctggcatgatgatgggcgcaacgctgatgcttacctggtggtggcaggccagtcgccttaatttaccccgccagcaaaaagcaacgatgcaggaaatctggcactcttttgtctccggtatctgggcgctgtttcttccagtcatcattattggcgggtttcgctccggcctgtttacccctaccgaagccggggccgttgctgctttctatgcgctgtttgtcgccacagttatttaccgtgaaatgaccttcgccacactttggcatgtactcattggcgcggcgaaaaccaccagtgtggttatgtttctggtggccagcgcacaagtttccgcctggctgattaccattgctgaactgccgatgatggtttctgatttactgcaaccgttggtcgatagtccgcgtctgctgtttatcgtcattatggtggctatcctgattgtcggcatggtcatggatttaacgccgacggtattaattcttaccccggtattaatgcctttagttaaagaggcaggaatcgatccgatttatttcggtgtcatgtttatcattaactgcagtatcggcttaattacaccgcctatcggtaatgtacttaacgttattagtggggtggcaaaactcaaattcgatgatgcagtcagaggcgttttcccttacgtcctggttttatatagtttattagtcgtatttgtttttattcccgatctcatcatcctccctttgaaatggattaattaaaaggaaaatattatgaaattacgctctgtaacctacgcattattcattgctggcctggctgcattcagcacatcttctctggcggcacaatctttacgtttcggttatgaaacaagtcaaaccgacagccaacatattgcggcgaaaaaattcaatgatttattgcaggagagaaccaaaggcgagctgaaattaaaactgttcccggacagcactctcggtaacgcgcaggcgatgatcagcggcgtacgtggcggcaccatcgatatggaaatgtccggcagcaataactttgccgggttaagtccagtgatgaacttgcttgatgtccctttcctgttccgcgataccgctcacgcgcataaaacgctcgacggcaaagtcggtgatgatctgaaagccagtcttgaaggtaaaggactgaaagtactggcctactgggaaaacggctggcgcgatgtcaccaacagccgcgcaccggttaaaacccccgccgacctgaaagggctgaaaatccgcaccaacaatagcccgatgaatatcgccgcattcaaagtctttggcgctaacccgatcccgatgccgtttgccgaagtctataccgggctggaaacccgcactatcgacgctcaggaacacccgatcaacgtcgtctggagtgcaaaatttttcgaagtgcagaagttcctttctctgacgcaccacgcctattccccgcttctggtggtgatcaacaaagcgaagtttgatggcttaagtccggagttccagcaggcgctagttagttctgcacaagaagcgggtaactatcagcgcaaactggttgctgaagatcagcaaaaaatcatcgacggcatgaaagaagcgggcgtggaagtcatcaccgatctcgaccgcaaagcctttagcgacgcactggggaatcaggttcgcgacatgtttgttaaagatgtgccgcagggagctgatctgctgaaagccgtggatgaggtgcaataaaccatgacgcaatactggctggggttagattgtggcggtagctggctgaaagccgggctgtatgaccgcgaaggccgggaggcaggcgtgcagcgcctgccgctgtgcgcattaagcccgcagccaggctgggcagagcgcgatatggcagaactgtggcaatgctgcatggctgtcattcgcgccctgcttactcattctggtgttagcggggaacaaattgtcggtatcggcatctccgcacagggaaagggcttgtttttgctggataaaaacgacaaaccgctcgggaatgctattttgtccagcgaccgccgggcgatggaaatcgttcgtcgctggcaggaagatggcatcccggaaaaactctacccgctgacccgacaaaccttgtggaccgggcatccggtgagcctgttacgctggctgaaagagcacgaaccagaacgctacgcgcaaattggctgcgtgatgatgacgcacgactacctgcgctggtgtttaactggcgtcaaaggctgtgaagagagcaatatttccgagtccaacctctacaacatgagtcttggggaatatgacccgtgcctcaccgactggctggggatcgctgaaatcaatcacgccctgccgcctgttgtcggatctgccgaaatctgcggggagatcaccgctcagacagccgccctgaccggtctgaaagcgggtacgcccgttgttggcggcctgtttgatgtggtttccaccgcactctgcgccgggatcgaagacgaatttaccctcaatgcggtgatggggacctgggcggtgaccagcggcataacccgcggtttacgtgacggtgaagcgcatccgtatgtctatggtcgctacgttaacgatggtgaatttatcgttcacgaagccagccctacctcttccggcaacctcgaatggtttaccgcacagtggggagaaatcagctttgatgagatcaatcaggccgttgccagcttgccgaaggctgggggcgatctctttttcctgccgttcctgtacggcagcaacgccggactcgagatgaccagtggtttctacgggatgcaggccattcacacccgcgcgcacctgttgcaggccatctatgaaggggtggtgttcagccatatgacccacctcaaccgaatgcgcgaacgttttactgatgttcacaccctacgcgtcactggcggcccggcgcactccgatgtctggatgcaaatgctggcggacgtcagcggtctgcgtatcgagctgccgcaggtggaagaaaccggctgctttggtgcggcccttgccgcccgcgtcggcaccggggtttatcacaacttcagcgaagcccaacgtgacttgcgacacccggtgcgcaccctgctgccagatatgaccgcccatcagctttaccaaaaaaaatatcaacgttatcagcatctcattgccgcacttcagggctttcacgcccgcattaaggagcacacattatgagccgaccacttctgcaactggccctcgaccacagtagtcttgaagccgcgcagcgcgacgtgacgctgttaaaagacagcgtcgatatcgtcgaagcgggcaccattctctgtttaaacgaagggcttggcgcggtgaaagccttgcgcgaacagtgcccggacaaaatcatcgttgctgactggaaggtcgccgacgctggtgaaacgctcgcgcaacaggcgtttggcgcaggcgctaactggatgaccatcatctgcgccgcgccgctcgcgacggtagaaaaaggccacgcaatggcacaacgctgcgggggtgaaattcagatagagctgttcggtaactggacgctggacgacgcccgcgactggcatcgtattggcgtgcggcaggccatttatcatcgcggtcgtgatgcacaggccagcgggcaacagtggggcgaagccgatctggcacgcatgaaggcgcttagtgatatcggccttgagctttccattactggcgggattacccctgctgacctgccgctgtttaaagatatccgcgtgaaagcgtttattgccgggcgggcactggcaggcgcggcaaatccggcgcaagtggctggcgatttccatgcgcaaatcgacgctatctggggaggtgcgcgtgcgtaatcatcagttagggatttatgaaaaagcgctggcgaaagatctctcctggccggagcggctggtgctggcaaaaagctgcggttttgattttgtcgaaatgagcgtggatgaaaccgacgaacggctcagtcgtcttgactggagcgccgcacaaaggactagcctggttgccgcgatgatcgaaacaggtgttgggatcccgagcatgtgcctgtccgcacatcgtcgctttccctttggtagccgtgacgaggcagtgcgcgaacgggcgcgggaaatcatgagtaaagcgattcgcctggcgcgcgatctcggcattcgcaccatccagctggcaggttatgacgtctattacgaagaccacgacgaaggcacccggcaacgttttgctgaagggctggcgtgggcagtcgaacaggcggcggcaagtcaagtaatgctggcggtggagattatggataccgcgtttatgaactccatcagcaaatggaaaaaatgggacgagatgctcgccagtccgtggttcaccgtctacccggacgtcggcaacctcagcgcctggggcaatgatgttcccgccgaactgaaactgggcattgaccgtatcgccgcgatccacctgaaagacacccagccagtcaccgggcaaagtcccggacagttccgcgacgtgccgtttggcgaaggctgcgtcgatttcgttggcatcttcaaaacgctgcataaactgaactatcgcggttctttcctgattgagatgtggaccgaaaaagccaaagagccggtgctggagattattcaggcgcggcgttggattgaagcgcgtatgcaggaggctggatttatatgttaacgtaaatgcaggaggctggatttatatgttagagcaactgaaagccgacgtgctggcggcgaatctggcgcttcccgctcaccatctggtgacgttcacctggggcaatgtcagcgcggtagacgaaacgcggcaatggatggtaatcaaaccttccggcgtcgagtacgacgtgatgaccgccgacgatatggtggtggttgagatagccagcggtaaggtggtggaaggcagcaaaaaaccctcttccgatacaccaacgcatctggcgctctaccgtcgctatgccgaaattggcggtattgtgcatacccacagccgccacgccaccatctggagtcaggccgggctggatctccccgcctggggcaccacccacgccgattatttttacggtgccatcccctgcacgcgacagatgaccgcagaggagattaacggcgaatatgaatatcagaccggcgaagtgatcattgaaaccttcgaagaacgtggcaggagtccggcacaaatcccggcggtgctggtgcattctcacggcccgttcgcatggggtaaaaacgccgccgatgccgtgcataacgccgtagtactcgaagaatgcgcctatatgggtctattcagccgccagcttgcgccgcagctccctgcgatgcaaaacgaactgctggataagcactacctgcgtaagcatggggccaatgcctattacgggcagtaatccctcacgccggggcttcatcgccccggcactacgaattgatatgttccttgctgtaacgccgcttccacgctgctggcgttaaaccagtatgtttctgaaaaatctgccggaaatagccaacgtcattaaaccgtattgcatggagcaggccgacaacgtcgagtcactgcataacctgttgctgcccgccgatgcgccatttacgacatttgaaggcaagggattgttcagccataagatcctgattcagacgccaggttcccggtatgaacagagcaatccagagcaacaacctttgtggcattacgacggagcaccagccgcaccgacatccaccggtgaattaaaaacgccagctcaccccggtgacaaaggtaaaactctcattacgatcaatcatcgggctgtcggtaatctcttccggcagctcgctgtatcctgcgctcgccatcaatacgacgtgctctcctatcgggtattttgccgtcaggctgacatagggcacccaggcatcctgcgcggaataacttgccagaccgctacgacgggactcactctcactaatgccatagtaatagtcactgaaattctcgtcataatagagaacgcccagcgcaggtgtcaggctcagacgacctatctgcattttgtggaatacgcttagctcccccacccagccgttgctgttatccagaacgtccgcagctgcagaggctttcacggttccccaacgctcgtggtgataccaggcaacccccgccatagccgtactatcacgcttatcaagctgttgcatggcataatcgtcattatcggtagggtcaaattccagcggcatccaggatgcggtcaggctaagttcatttttttcactttggctcagaataaaacctaacgtggtctgacgaacataaaaagtatcaccttcataactaatcagcggaattgccttcgtattttcattataaccgcgataagggctttcattataagccgcaccagcaccaatggataattcagaagcagttgcgcttgccataaaaggcaacgcaaataacgccacaatattgcgattaattaacatgtccggtattccattttaaaataagataaaaaagagtcggcataataatgcttacaatttctccggtgcaagattcatatttatatagtaatatataaaattatatataattgggctgttgcgatgacaaaattacaacttaagtaccgggagttaaaaattatcagcgtaatcgctgccagtgaaaatatcagccatgccgcgactgtacttggcatcgcacaggccaacgtcagcaaatatcttgctgattttgaaagtaaagtgggtttaaaagtctttgaccgaaccacccggcagctgatgctcacaccttttggcaccgcgctgttaccgtacatcaacgacatgctggacagaaacgagcaacttaataattttattgcagattataagcatgagaaacgtggtcgggtcaccatctacgccccaaccggcataattacctatttatccaaacatgtaatcgataaaattaaagatatcggtgatatcaccttaagcctaaaaacctgcaatcttgagcgtaatgccttttatgaaggcgtcgaatttcctgatgattgtgatgttttaatcagctacgctccaccaaaagatgaaagcctggttgccagttttattacccaatatgccgtaaccgcttatgccagccagcgctatcttgagaaacatcccattagccgtcctgacgaactcgaacatcactcctgtattttgatcgacagcatgatgatcgacgacgcgaatatctggcgcttcaacgtcgccgggagtaaagaggtgcgggattatcgcgtgaagggaaattacgtttgcgacaacacgcaatctgcgctggagctggcacgaaatcacctggggattgtgtttgcgccagacaaaagtgtgcagagcgacctgcaagacggcacgctggtgccctgctttcagcaaccctatgaatggtggctggatctggtggctatcttccgtaaacgggaataccagccctggcgggtccagtatgtgctggatgaaatgctgcgtgaaattcgccaccagcttgctcagagccagcaactgcggcctgaacaagcggcggaaagcgaagattaatgatcgagataaaggtaatgcacccagctggtcatgcgtaatagcactttgcgcatcacgctgacatggctgaaatgatcagagtaaaccgccacctgggcgtaaataccgtctggtaaagcgctcaaatcagtgtgctcatccagttcaatggtcgcgataacgccatcactacccggcgctgtgtttaacgtctgtaaggtgccggtgctctgataagctccgccgggaacggctggactaatggctgccagcttaccgctgaataccttacctggcagagcattaaacaccacttccgcatcgtcgccaggagccagtcgcagcaaggagttctgacggaactgcgccacgatttgtcgtttctgatcgggtataaacaccatcaccggacgtagcggcaggctcgcggcataggtacccggacgaatcagtacctgggtcacataaccatcgctcggcgcacgcactatcgtctgctcaaggttatattttgcttccgcgagctgtgctttcaggctggcgatttgagaatgttcacccaacaccaggctatccagctggctctggatctgtttttgttccgccgcgctactcttcacggaggcttcctgcgccagataattttgccgcgccacatcgatatcgcgttcactaaacgggtttactttcgcctggctgccacgtgcgtaacgctgatactctttagcgaatttatcccgcgtggcctttgcctgctgagtattcgccgccatctcatctaactctgcgcccaacgcccgctgtttatgttctgcggtaacgatatccgccatcagccgatccacccgcgcctgataacgcgtcgggtccagtcgaaatagcacctcaccttttttaatcagcgtatttttcttatccgtcacttcaatcaccacaccagtcacctgtgggacaacaggaatagaaataaccgctttttgcgctttaaaggtatacggatggttatagttcattaacagaattagaccgctgacaataaatattccacccagggccgctgtgggaatggtccatttatttacgggaattttgaagatcttaaacattgcccatgcaaaagccacataggtcaaaataatcagtaaatccataagtattactcggcagaagaggatttgatgtcggcgagctgtttctccagcccggcaatgcgctgttgcagttgcataacggaactatcatggctttgcattccccatccccgctccgggcggtaaagcgtggcccaaatccacaaaaacggccagataacatgtaacgtaaaaagactcacccaaccagcaacatgaatggcgtcggcatgaggatgattacgttttttggcaatcaggtagggaatatcatgtaaaataatgatcccatagaagatcaccagaaatacaaaaataagcactcccagtgcaaaatagtccaggaacatatttccctcaaagaatataaaaaagaacaattaacgcatattatgaaatgccatgatgcagtgcaatttccttatttatataacgacatattgttttttatatactttcttaaatgtgctgtctggtttttcaacaggacgaggtttatcatattgaaatagtggaactattggccaaactaatgaataactccagtaaaacatccacagtacagattaagcgtattaaaccttcaattatctaccgtttattgctgattggcctcggatcaccaatggtgatttacggcctggttcgcccgctcaccatcgaaacgcgagattaaactcctgacaaaacacgccccagaaacgtacttctgttggcgtagtctgggttattgcgcacgtaggtttaaaacgtaaattgtaacaacgtgcgctttgtttatgccggatgcggcgtgtacgccttatccggcctacggtcaggttcccgtaggcatgataagacgcgtaagcgtcgcatcaggcaatgaatacccaatgcgaccagcttcttatatcagaacagccccaacggtttatcgctgtagctcaccagcaggcacttggtttgctggtaatgctccagcatcatcttgtgggtttcgcgaccgataccactttgtttgtagccaccaaacgccgcatgtgccgggtaagcgtgataacagttggtccacacgcgcccagcctgtatgccgcgccccatcttataggccagattaccgttgcggctccagacgcccgcgcccaggccatattgcgtatcgttcgccagctccagcgcttcttccatcgttttgaaggtggtcaccgccagcaccgggccaaaaatctcctcctggaacacccgcatattgttctgaccaaacagaatcgtcggttcgaggtagtagccgtctttcagttcaccttccagcagcttgcgccgcccgcctgtgagcacgtcagcgccctcttttttaccgatatcaatgtagttgaggatggtttccagttgcccgtgagaaacctgcgcgcccatttgcgtcacgctgtcgagcgggttaccgctacgaatgctttcgacacggcggatggcgcgttccataaagcgttcgtagatagattcctgcactaaagcacgactcggacaggtgcaaacttcgccctggttaaaggcaaacagtgcaaagccttccagcgctttatcgaaaaaggcatcttcttcatccatcacatcagcaaagaagatatttgggctcttaccgcccaactccagcgtcaccggaataatgttttgcgttgcgtattgcataatttgttggcccacttccgtactgccggtaaacgccactttggcgatgcgtttgctggtcgccagatattcgccaattaccccacctgcgccattgaccacgttcaccacgcccggcggcagtaaatcaccgacaatttccattagcagcagtacagaaagcggggtaagacgtgcgggtttcagcaccacacagttgcccgccgccagcgcgggagccattttccagctcgccatcagcagcgggaagttccacgggataatctgccccaccacgcctaacggttcatggaaatgataggccacggtttcgctatcaacttcactgatcccaccttcctgcgcccgaatacagctggcgaaatagcggaaatggtcaatcgccagcggtacatccgcagcactggtttcgcgaatgggtttgccgttatcccaggtttcagctgtcgctaacagctcgaggttttgttccattcgatcggcaatcttaaacagaatcgccgcacgatcctgcacgctggtgtgcgcccatttatctttcactttgtgcgcagcatccagcgccagatcgatgtctcgtttgccgctagacgccacttcgcacagcagctgcccggtcaccggcgtcagattctggtaatactcgccgtcggcaggggctacccattcgccgccaataaagttgtcatagcgggcttttaacttgagggggaaaccatactcgccgggcttaatctgtgcactagggggattattggtcatgatcgtctccttgcggtgtgaggtataacaagggtagacgtgactggcgaaatcttcgccagtcggtaacagctttacgacagctatcacgaatttacgggcaagggttacagagatagttgaaaaagcggctaacaatttgccagccgttgtggaaatgatgattacatcgctgcgcgataaatcgccacaatttcttcgtgagttgcctggatcgggttagtaaagccacaggcatctttcagggcattagtcgccaataccgcgaaatcttcttctttcacgttcaggtcgcgtaggcctgccgggatatccactttcttcgccagttcacggatggcgttaatgcaggcttcagcaccttccgcgtcgtttttacctgtcacgttcacgcccattgcagcggcacagtcacgcagacgtgcagcggcgactttgctgttgaatacctgaacgtgcggcagcaaaacggcgttacatacaccgtgtggcaggttgtagaaaccgcccagctggtgcgccatcgcatgaacataacccagagaagcattattgaacgccataccggcgaggaactgggcataagccattgcttcacgcgctttcgcattactgccatcttcaacggctaacggcaggttttcggcaatcatggtcacggctttcagtgcacaagcgtcagtgatcggcgtggcggcaatagaaacatatgcttcgatagcgtgcgttaaggcatccatacccgttgcggcggtcagactcttcggcataccaatcatcagagaggagtcattgacagaaagcagcggagtgacatgtttatcaacaatcgccattttgatatgacgcgcttcgtcagtgatgatgcagaaacgggtcatttcagaggccgtacccgccgtggtattgatggcgatcatcggcagctgcggttttgcagagcggtcaacgccttcgtaatcgcgaatatcgccgccattggctgccaccagcgcaataccttttgcgcagtcgtgtggagaaccaccgcctaaggagatcacgctatcgcaattattctctttaagtaatttcaaacctgcggcgacgttttccgtggtggggttaggttgggtgccatcataaataacgctaaaaatattgcgttcttccagtgctttttgcacatcgcccgccatacctaatttcgttaacatattgtcagtgacaattaaggtacgggtaaatccataatctgccatcatattcattgcatcagtcaaactatcagcgccgatgacattcacagaaggaataaagaacgtactagctgccataacacactcctgaaagtgtaaaaaagggcgggcagcttactgaggattttcattcgaaaatatgatcagtattattgattatcaaaattaatctaataaaaagcacattgtattcattaaacaatgtgctttttttaaattcataagaattttgtattaatttattttaaaacttaattaatcatttccttatttttccggaaataataatgcgtcgcgcaataaatgatcatttccacgacgacgcgtaaagccaatgcggtcaaaatattccagaatctgaattgccagctttcggcctacgcctaagcgatcgcggaaatccgccgcgcaggtactaccacactcctgatcgagatcgcggatcatattggcaaactcgacaatccgatcgttacggtaataacgatctttaacgatcgcggtaattattccttgctgcgccgcctggcgtagagtcaggcgcattgcctgctcgtcggttcccgtctcttttgccaggtcacgcacccaccacggttcgtcaccaaacagtggctctgctttttgccagatggcctgctgctcttcgctgaagcccgctttgtgatctggcagatgcagccagccgtgatggctgtggatgtcgccgctttcgcgcatcttttcaatcagcaacagtaccagcgcttcatcttccattggcaacgccatacgtcgcagacgttcgcgcccagggccaggttcatcgcgatgttgctcatgataagtcgctaatgtgtcgagaattttccgctgccagcgggcggcaaccggcgcattcaacaagctataaccagcctgaatataaccaggctgttgcagcaattcgcgcatcccttcgccgttgagctggcgcgcccaggcgaaatccgcaaggttaaccgcgccgcgttccagatgaacagataacgcatcggcatcgctctgcgcccgtgcaagagacgccagccattgcagatattccggcttacgtttaccgcgacgcggcgggttaagcatcacgacgcgcgctccggccagcgtgttgcgggcagagatatcgcgcaataccaggcggtcgttatctgccagccataacggggtgtcgaagaccagttcagcaaggttatcttccagcagactaacgcgtcccgtgacgtggctggcggcgtggtgaatatgcagcggctgccactgggtcagcggtgtatgggtttgaagctcgacaatcacccgtgtgaacggctctggcggcacatcggcaagcagccagtcgccacggttaatctgctctttttccgcatcacccgcgatgttaagcgcgatacgctgcccggcattggcggtttctgttggctggttttgcgcatgcagcgcacgtacacgcatcggtttatttacaccagtcagccagagactatcgcctaccttcacttccccgcttaacgccgtaccggtgacgaccagcccggcaccttttacggtaaatgcgcggtcaatcgcgaggcggaaactatgttggctggcgtgctcgcgttccggcaactgaagcagatgctcgcgcagggcatccattccccgaccttcggttgctgcggtgataaacagttttgcctcagcaaaaccgtattcccgcagaacctcctttacctggcgttcaacctcatcaacacgcgcttcgtccacgcgatcggctttggtcagcgccactgtcagcatcgggttaccggtcagctgcaaaatcgccagatgctcacgggtctgtgccatcacgccgtcatcgcacgccaccaccaacagcgcgtgatcgataccaccaacgcccgccagcatgttggaaagaaacttttcatgaccgggaacgtcgataaaaccaggcacgcgaccatccggctgcggccagtaggcatagccgagatcgatggtcatgccgcgctttttttcttccggcagacggtcagcatttacgccagtaatcgcctgcaataaggttgttttgccgtggtcaacgtgtccggcagtcgcaataatcatttcaacaacatctccaaaaaccgttgctcatcttcaaggcagcgtaaatccagccacaatcgtccgtcataaatacgaccaatcaccggcactggcaattcacgccagcgggcggctaaactctcaaggtggctaccgcgtccatcatggggtgtaaacgttaatgccgcgctcggcaggcgatcaaccggcaggctaccactgccaatctggctaagacatggcataacctgtaccgcaaactccgcgccgtaatgtgcggcaaggggggcctgtaaacgttgtgcctggatttgaatgacctctgcgctgcgggtaagcaggcgcagggtcggtaatttttcactcagagcttcagggtgtaaataaagacgcaacgtggcttccagcgccgcgagggtcattttatccgcgcgtaatgcacgcttcagcgggtggctttgcaggcgggcgatcatctcttttttaccaacaataattcctgcctgcggcccgcctaacaacttgtcgccggagaaactcaccagactgacgcccgccgcaatcaactcctgcggcattggctctttcggcaaaccgtactggctaagatcgaccaggctgccactgcctaaatcagtcactacgggaacatccagctctttgccgagcgccaccagttccgcttcatctatcgctttggtgaacccctgaatgctgtagttactggtatgtactttcatcaacagtgcggtattttcattcaccgcctgacgataatcattcgcgtgcgtgcggttggtggtccctacttcgtgtagggtgcagcctgcctgacgcataacatcgggaatacgaaacgcgccgccaatctccaccagttcgccgcgagataccaccacctcttttccgctggcagtggccgccaacatcaataacaccgccgccgcattgttattgacgatacaggcatcttccgcccccgtaatacggcacagcagctgcgccagcgcccgatcgcgatgtccgcgtccggcgtcgtccagatcatactcgagggtcactgggctacgcatagcctgcgcaacggcttccaccgcggcttccgcctgtaaagctcgcccaaggttggtatgcagcacggttcccgtcaggttgatcaccggacgcagcgcgctctgcgcttctttcgtcaaccgggcatcgacttcttgcgcccagttttcacaccacgcaggcagcgtctggctgccacgaatcacttctcgcgcttcgtcgagcatctgacgcaacaattccaccacgcgggtgtgaccataagtatcacgcaaagaaaggaaggagctatcgcgcaataagcgatcaatagccggaagttgactatagagggaacgcgtttcggttgtcataggaaacctggctgatcaaggccctctcacacggagaagggcgtttaacataaccacggattgtaacgtgagatgggtcaggaggacatatcgcgcatcaagcctttggcggttcggtgcgagcaaaactttcgcggctaaacaggttttcgaccagtttgactaagtgtgggcggtcgacacaccaacctggcgcaacgcggcggaaattgagatatccgacggcacaggcaatggcgatagtcgccagattgaccgtatcggttttgagtgtgccatcgaccagatatccttccagcacatccagactgcggttgattttctcccgctggcgtaacaattcatcttcagactgctgcgccgctggacgcgcctgttcacgcacgcttaccagcccggcatccataatgccatccgccagtgcctcaattttgcgcacccgcaagctctccagcggatcgcgcggcaacatcgccggagcgacattcattaattcaatatattcagcgatgatcgggctatcaaaccagcattcgccctcttcggtcaccagcaccggcacttttcctaacgggttaaattgcgccacgccgttgtccgcgttatagggcagttcattaataaattcgaaagttatgcccttttctaacaacagaatagaaagtttgcgtacaaacgggctggtgtagctaccgacgagtttcatgccgagtcctttgtgcgaggaaaaatatcagtatggctcaatgatccaaataaagataatgcatccagctggtcattcttagcagcactttccgcatcacgctaacatggctgaaatggtcggagtaaaccgccacctgggcgtagatgccgtcgggtaaggcatcgatatcatcgttagggtccagttcaatggttcccagcacaccgtccgtgccgggcacgaccgttaaactttgcaataccccctgcgcctgataagaaccgcctggcacgacaggtaaaatactagtcagtttgccgtgaaacacctgcccaggtagcgcgttaaacaccacttccgcatcatcgccaggtttcagacgtaacaggctgttttgccgaaattgggcgacaatttgccgtttttgctcggggatgaagaccatcaccggacgcagcggcaaggcagctgcgtatgtacctgggcggatcagtacctgagtaacgtagccattgctcggcgcgcgaatgacagtctgctcaaggttatattttgcttcagtaagttgcgctcttaagctcacaatctggctttgctcgccgttaaccatactgtcgagctggctctggatctgcgcctgctccgccacgctgcctttcaccagcgcatcctgcgcgaggaaattttgccgcgcatcgtcgatgtcacgttcgctgaacggattcaccgccgcctggctgcctttcaagtaacgttgataatttttaaacagacggtcgcgctccgcactaacctgggtggtgttggcctgcgcttcagtgagctgcgcacgcagcgtctttatattatgcgtcgccgtcatcaggtcagcctgaagtctgtcaactcgcgcctggtaacgaaccgggtcgagcttaaaaagcacctcgcccttttgaataagctgattattcttgtcagtgacttcagtaacaattcccgtcacctgtggcgtgatagggatcgctatcactgccttttgcgcggtaaaagtgtaagggtggttgtagttcatcaacaaaatcaaaccactcaccagaaacacgcctcccagcgccgccgtcgccagcgtccactgatttaccggaatgcggaagattttaaagaccgcccacgccagcgccacgtaagttaaaacaatcaatagatccataattagatctccgggaacgtggaatagtcagtctttttctcggcggcgagttgatgctccaaccgggaaattcggtcagaaagtgcggcgatttccgggtcagtcgctttctcctggctcgcaacatgactctgcataccccagccacgctccggttgatagagcgtcgcccagatccacagaaacggccagataacatgcagagtaaacaggctcacccagcccgccgtatgaatagcgtcggcatggggatggttgcgctttttggcaatcagataagggatgtcatgtatcgcgatgattccataaaaaatcaccagaaagacgaagatcagcactcccaacgcgaaatagtttagaaacatatctgcctcggattcacgtttatcagtgttgtttttgggctggcagccagaagggagtcaggctgatattttgacaataatccgggttcgcgattctcgccataacaccaaagaataatttttagaggtgatgagttgcttagttacataacgattgtatgacgaaggcataacatgctgtagatcacatcaggtgaacgccgtaagaaaatatcttgtgattcagatcacaaagattcaacaaaccatcaaaacaaaaatgtgacactactcacatttaaatgccatttttagcgaaaatcgccgccttgttgcttttttacacaagcgttttgtgatgaacgtcacgtcaattacctctctaccccctatatttatgtgattgatatcacacaaaaggccgtcgactggacagttaaccgattcagtgccagatttcgcagtatctacaaggtccggctacctctgccgccacattaacaaaaaacctcgggcttccagcctgcgcgacagcaaacataagaaggggtgtttttatgagttccgatattaagatcaaagtgcaaagctttggtcgtttcctcagcaacatggtgatgccaaatatcggcgcgtttatcgcgtggggtatcatcaccgcgttatttattccaacagggtggttaccgaacgagacgctggcgaagctggtcgggccgatgatcacttatctcctgccgctgctgatcggttataccggtggtaagctggtaggcggcgaacgtggcggcgtagtcggtgccatcaccaccatgggcgttatcgtcggcgcagacatgccgatgttcctcggttctatgattgcaggtccgctgggcggctggtgcattaagcacttcgaccgctgggtagacggtaagatcaaatccggttttgagatgctggtgaataacttctccgcaggcatcatcgggatgatcctcgctattctggcattcctcggcattggcccgattgttgaagccctgtccaaaatgctggctgcgggcgttaacttcatggttgtccatgacatgctgccgctggcgtctatctttgttgaaccggcgaaaatcctgttcctcaacaacgccattaaccacggtatcttcagcccgctgggtattcagcagtcccatgaactgggtaaaagtatcttcttcctgattgaagctaacccaggtccaggtatgggcgtgctgctggcgtacatgttctttggtcgtggtagcgctaaacagtctgcgggcggtgcggcaatcatccacttcctggggggtatccacgaaatctacttcccgtatgtgctgatgaatccgcgtctgatcctcgcagtcatcctcggcggtatgactggcgtgttcacgctgactatcctgggcggtggtctggtttctccggcatctccgggttctatccttgctgtactggcgatgacaccaaaaggtgcttacttcgctaacatcgcgggtgtgtgtgcggcgatggctgtctccttcgttgtctctgctattttgctgaaaaccagcaaagtgaaagaagaagatgatattgaagcagcaactcgtcgtatgcaggacatgaaagctgagtctaaaggcgcatctccgctgtctgctggcgatgtgactaacgacctgagccacgtacgtaaaatcatcgttgcctgtgacgccggtatgggttccagtgcgatgggcgcaggcgttctgcgtaagaaaattcaggatgcaggtctgagccagatttctgttactaacagcgcgatcaacaacctgccgccagatgtggacctcgtcatcactcaccgtgacctgaccgaacgcgctatgcgccaggttccgcaggcacagcatattagcctgaccaacttcctcgacagcggcctgtacaccagcctgaccgaacgtctggttgctgcccaacgccacacggcaaacgaagagaaagtaaaagacagcctgaaagacagctttgacgattccagtgctaacctgttcaagctaggcgcggagaacatcttcctcggtcgcaaagcggcaaccaaagaagaagcgattcgttttgctggcgagcagctggtgaaaggcggttacgttgagccggaatacgttcaggcgatgctggatcgtgaaaaactgaccccgacttatctgggtgagtctatcgcggtgccacacggtacggttgaagcgaaagatcgcgtactgaaaacgggcgtcgtgttctgccagtacccggaaggcgtgcgcttcggtgaagaagaagatgacattgcccgtctggtgattggtattgctgcccgtaacaacgagcacattcaggttatcaccagcctgaccaatgcactggatgatgagtccgtcatcgagcgtctggcacacaccaccagcgtggatgaagtgctggaactgctggcaggtcgtaagtaatccaatcccaccctctccacatggagaaggtggggttaattgcctgatgcgctacgcttatcaggcctacaggatgcatcacaatttgttgaatttgcacgttcttgtaggccggataaggcgcttacgccgcatccggcgctgcccctctcctcacggagagggtttgggtgagggaaaagcctcaccccagccctctcgggtaaaaacattgatgaaggttaatactatgaaagcattacattttggcgcaggtaatatcggtcgtggctttatcggtaaactgctggcagacgcgggtatccaactgacgtttgccgatgtcaatcaggtggtacttgatgccctgaatgcccgtcatagctatcaggtacatgtggttggtgaaaccgagcaggtagataccgtttccggcgtcaatgctgtcagcagcattggtgatgatgtcgttgatctgattgctcaggttgatttagtcactaccgccgttggcccggttgtgctggaacgtattgctccggcaatcgccaaagggcaggtgaaacgtaaagaacaaggtaatgaatccccgctgaacatcatcgcctgtgaaaacatggtacgcggtaccacgcagctgaaaggccatgtgatgaacgccctgccggaagacgccaaagcgtgggtagaagaacacgttggctttgtcgattccgccgttgaccgcatcgtaccgcctagcgctagcgcaactaacgatccgctggaagtgacggtagaaaccttcagcgaatggattgtcgataaaacgcagttcaaaggcgcactgccgaacatcccaggcatggagttaaccgacaacctgatggcatttgtcgaacgtaaactcttcaccctgaacacgggtcatgctataaccgcgtacctcggaaaactggccggtcatcagaccattcgtgacgcgattctcgacgagaaaatccgcgcggtggtaaaaggtgcgatggaagaaagtggtgcagtattgatcaagcgctacggctttgacgctgacaagcatgcggcgtacatccagaaaattctcggccgttttgagaacccgtatctgaaagatgatgtagagcgcgtaggccgtcagccactgcgtaaactgagtgctggcgaccgtctgatcaagccactgctcggtacgctggaatatggtctgccacataaaaacctgattgaaggtattgccgctgcaatgcacttccgcagtgaagatgatccgcaggctcaggaactggcagcactgatcgctgacaaaggtccgcaggcggcgctggcacagatttccggtcttgatgccaacagcgaggttgtatccgaggcggtaaccgcttataaagcaatgcaataatggtggaccaggcgcaggacaccctgcgcccgaataacagattgagtgatatgcaggcaacaatggaacaaacccaggcctttgaaaaccgtgtgcttgagcgtctgaatgctggcaaaaccgtgcgaagctttctgatcaccgccgtcgagctcctgaccgaggcggtaaatcttctggtgcttcaggtattccgcaaagacgattacgcggtgaagtatgctgtagaaccgttactcgacggcgatggtccgctgggcgatctttctgtgcgtttaaaactcatttacgggttgggcgtcattaaccgccaggaatacgaagatgcggaactgctgatggcattgcgtgaagagctaaatcacgacggcaacgagtacgcctttaccgacgacgaaatccttggaccctttggtgaactgcactgcgtggcggcgttaccaccgccgccacagtttgaaccagcagactccagtttgtatgcaatgcaaattcagcgctatcaacaggctgtgcgaagtacaatggtccttagtctgactgagctgatttccaaaatcagcttaaaaaaagcctttcaaaagtaagcaacgtctgcttactgcccctctacctgcttcggccgataaagccgacgataatactccagacgttgtagatataacggcacgctttcatcgggtattccggacggaatcgcgttacggggaggaagttttttcagatactcccggaacgcctggctacttgccatgaaatctacggctttatcgataagaagcggaacgttttcacctaatttgcccatgatgatatctccgtattaccccgcgccgggaatgcgcggccgccaattttagtttaggttcccggtaaagatgacattaaggaaaacgtgctgaatcctcaataatcatccgctgctgtttattatcttttttctatagatttcttaattaatcaacgaattgcgcagtttttgagcatgttaatgattacgttacagaactattacaatgtcattagttgtgaacaaagcacctggtcgcgcatactaggggctataaatttatctttatcagaagccatcacatgaaagaagtcgaaaaaaacgaaatcaaacgcctcagcgatcgcctggacgccatccgccaccagcaggccgatcttagcctggttgaagccgcagacaaatatgccgagctggaaaaagagaaagccacgctggaagcagaaattgctcgcctgcgtgaagttcatagccaaaaactgagtaaagaagcacagaagctgatgaagatgccattccagcgcgcaattaccaaaaaagagcaggctgatatgggcaagctgaagaaaagtgttcgcggactggtcgttgtgcacccaatgaccgcactgggccgcgaaatgggcctgcaggagatgactgggtttagtaagaccgcgttttaagaacacagtatctacagggtgattctgcacattcctataggccgagtaaggtgttcacgccgcatccggcaagataaggcgctctggatcaacaacctaagggcaattctctgatgaggattgcccttttctttaccagacatctccccccacaagaattggccctaccaattcttcgcttatctgacctctggttcacaatttcccaattaaaactcacatcaatgttgccaatacataacatttagttaaccattcattgtcattatccctacacaacacaattggcagtgccacttttacacaacgtgtgacaaggagatgagcaacagactcattacacgatgtgcgtggactccaggagacctgcaatgaatctctggcaacaaaactacgatcccgccgggaatatctggctttccagtctgatagcaagccttcccatcctgtttttcttctttgcgctgattaagctcaaactgaaaggatacgtcgccgccagctggacggtggcaatcgcccttgccgtggctttgctgttctataaaatgccggtcgctaacgcgctggccagcgtggtttatggtttcttctacgggttgtggcccatcgcgtggatcattattgcagcggtgttcgtctataagatcagcgtgaaaaccgggcagtttgacatcattcgcagctctattcttagcataacccctgaccagcgtctgcaaatgctgatcgtcggtttctgtttcggcgcgttccttgaaggagccgcaggctttggcgcaccggtagcaattaccgccgcattgctggtcggcctgggttttaaaccgctgtacgccgccgggctgtgcctgattgttaacaccgcgccagtggcatttggtgcgatgggcattccaatcctggttgccggacaggtaacaggtatcgacagctttgagattggtcagatggtggggcggcagctaccgtttatgaccattatcgtgctgttctggatcatggcgattatggacggctggcgcggtatcaaagagacgtggcctgcggtcgtggttgcgggcggcagctttgccatcgctcagtaccttagctctaacttcattgggccggagctgccggacattatctctagcctggtaagtctgctctgcctgacgctgttcctcaaacgctggcagccagtgcgtgtattccgttttggtgatttgggggcgagtcaggttgatatgacgctggcccacaccggttacactgcgggtcaggtgttacgtgcctggacaccgttcctgttcctgacagctaccgtaacactgtggagtatcccgccgtttaaagccctgttcgcaagcggtggcgcgctgtatgagtgggtgatcaatattccggtgccgtacctcgataaactggttgcccgtatgccgccagtggtcagcgaggctacagcctatgccgccgtgtttaagtttgactggttctctgccaccggcaccgccattctgtttgctgcactgctcagcattgtctggctgaagatgaaaccgtctgacgctatcagcaccttcggcagcacgctgaaagaactggctctgcccatctactccatcggtatggtgctggcattcgcctttattagcaactattccggactgagtagtacactggcgctggcactggcgcacaccggtcatgcattcaccttcttcagcccgttcctcggctggctgggggtattcctgaccgggagcgataccagttctaacgccctgttcgccgcgctgcaagccaccgcagcacaacaaattggcgtctctgatctgttgctggttgccgccaataccaccggtggcgtcaccggtaagatgatctccccgcaatctatcgctatcgcctgtgcggcggtaggcctggtgggcaaagagtctgatttgttccgctttactgtcaaacacagcctgatcttcacctgtatagtgggcgtgatcaccacgcttcaggcttatgtcttaacgtggatgattccttaatgattgttttacccagacgcctgagtgacgaggttgccgatcgtgtgcgggcgctgattgatgaaaaaaacctggaagcgggcatgaagttgcccgctgagcgccaactggcgatgcaactcggcgtaagtcgtaatagtctgcgcgaggcgctggcaaaactggtgagtgaaggcgtgctgctcagtcgacgcggcggcgggacgtttattcgctggcgtcatgacacatggagcgagcaaaacatcgtccagccgctaaaaacactgatggccgatgatccggattacagtttcgatattctggaagcccgctacgccattgaagccagcaccgcatggcatgcggcaatgcgcgccacacctggcgacaaagaaaagattcagctttgctttgaagcaacgctaagtgaagacccggatatcgccagtcaagcggacgttcgttttcatctggcgattgccgaagccagtcataacatcgtgctgctgcaaaccatgcgcggtttcttcgatgtcctgcaatccagtgtgaagcatagccgtcagcggatgtatctggtgccaccggtttttagtcaactgaccgaacaacatcaggctgtcattgacgccatttttgccggtgatgctgacggggcgcgtaaagcaatgatggcgcaccttagttttgttcacaccaccatgaaacgattcgatgaagatcaggctcgccacgcacggattacccgcctgcccggtgagcataatgagcatagcagggagaaaaacgcatgattatttccgcagccagcgattatcgcgccgcagcgcaacgcattctgccgccgttcctgttccactatatggatggtggtgcatattctgaatacacgctgcgccgcaacgtggaagatttgagtgaagtggcgctgcgccagcgtattctgaaaaacatgtccgacttaagcctggaaacgacgctgtttaatgagaaattgagcatgccggtggcactggctccggtgggtttgtgtggcatgtatgcgcgtcgtggcgaagttcaggcagccaaagcggcggacgcgcatggtattccgtttactctcagcacggtttccgtttgcccgattgaagaagtcgcgccagccatcaagcgcccaatgtggttccagctttatgtactgcgcgatcgcggctttatgcgtaacgcgctggagcgagcaaaagcagcgggttgtagcacgctggttttcaccgtggatatgccgacaccgggcgcacgctaccgtgatgcgcatagtggtatgagcggcccgaacgcggcaatgcgccgctacttgcaagcggtgacacatccgcaatgggcgtgggatgtgggcctgaacggtcgtccacatgatttaggtaatatcagtgcttatctcggcaaaccgaccggactggaagattacatcggctggctggggaataacttcgatccgtccatcagttggaaagaccttgaatggatccgcgatttctgggatggcccgatggtgatcaaagggatcctcgatccggaagatgcgcgcgatgcagtacgttttggtgctgatggaattgtggtttctaaccacggtggccgccagctggacggtgtactctcttccgcccgtgcactgcctgctattgcagatgcggtgaaaggtgatatagccattctggcggatagcggaattcgtaacgggcttgatgtcgtgcgtatgattgcgctcggtgccgacaccgtactgctgggtcgtgctttcttgtatgcgctggcaacagcgggccaggcgggtgtagctaacctgctaaatctgatcgaaaaagagatgaaagtggcgatgacgctgactggcgcgaaaagcatcagcgaaattacgcaagatagcctggtgcaggggctgggtaaagagttgcctgcggcactggctcccatggcgaaagggaatgcggcataatcgtttgcgccccctcaccctaaccctctccctcagggagaggggaccgttcggcgctgtatgtactccctcactctgaaacgacaccgcactctttttttctccctcgcccctccggggagagggccggggtgaggggaaaaggccgcactgctcaccaattttctgctatcctgcccccgcactaagggggcagtatgctaaacatcgtactttacgaaccagaaattccgccaaatactggcaacatcatccgtctttgcgctaataccggctttcgtctgcatatcatcgaaccgatgggatttgcctgggacgataagcgcctgcgccgcgcggggctggactatcacgagtttaccgccgttacgcgtcatcatgactatcgcgcgttcctcgaagcagaaaatccccagcgcctgttcgccctcaccacgaaaggtacacctgctcacagcgccgtaagctatcaggatggcgattatctgatgttcggcccggaaacacgcggcctgccagcgagcattcttgatgccctgcccgctgaacaaaaaattcgcattccgatggtgccggacagccgcagcatgaatctgtccaatgcggtgagcgtagtggtgtatgaagcctggcggcagttggggtatccgggagcggtattgagagattaattactgtaggccggatagatgattacatcgcatccggcacgatcacaggacattagatcccatccccatactcaaatgtatggttaataccgttgaaatgctggtccatatccatacttggcttatcgctgtctggtttaccgacaatacgagccggaacgccagcggcggtggtatgcggcggcaccggttgcagcaccacggaacctgcgccaatcttcgcgccgcgcccaacttcaatattgccgaggattttcgcgcccgcgccaatcatcacaccttcacgaattttcgggtgacggtcaccaccagatttacccgtaccgccaagcgtcacagattgcagaatgcttacgtcgttttcaatcaccgccgtttcaccaacgacgatgcctgtcgcgtggtcaagcatgataccgcgaccaatttttgctgccgggtgaatatcgacctggaacgtcacagaaacctggttttgcagaaagattgccagtgcgcgacgcccctgattccacaaccagtgaccgatgcgataggcctgcaaggcatgaaaacccttcaggtataacaacggggtactgtatttatcgactgccgggtcgcgggtacgcaccgcctgaatatcacaggccgcagaggcgatcatttccgggtcagcggcgtaggcttcttccaccacttcacggatagcaatagcaggcataattgggctactcagcttgttcgccagcatgtagctcagtgcactgccaaggttttcgtgcttgagtagcgtcgcgtggtaaaaactggccagcattggctcacagtccgccagcgttctggcttcggctttaatattgttccagacaatttccagttcttcacagctcattgcttactccacacgatgagataatgaccggcccgttctgcgcgggccgggtcatagcggtaacaaaggttccctggggttagtggctgctgcgctcgtccttgcgtgcacgacctagtaaagtcaatgctgcctcgcgcgcgttttttccgcaatataatacttgataaatttcctcggttattggcatttcaacgccgaagcgatgcgccagttcgcggacttctttcgtattgcggtagccttccaccacctgaccaatcttctcctgcgcgctttgtacatccatgccctgaccgagcatcatgccaaaacggcggttacggctctggttgtcggtacaggtaagcaccagatcgccaagccccgccatgcccataaaggtggcagggtcggcacccagcgccgcaccaagacggctcatttcagccagcccacgggtgatcagcgccgtacgcgcattcgcaccaaaaccgataccgtcggacatccccgcaccaatggcaataacgtttttcaccgcgccgccaagctgcacgccaatgaaatccggattgctgtaaacgcggaaacttttgccgcagtgcagcagctgctggagatcatcggcaaaggtctgatcggtgctggccaggctaatagctgtcggtaaacctgccgccagttctttcgcaaacgttgggccagagataaccgccagcggaatttgatcgcctaaggcctcacgcgccacgtcctgtaacagacgtccggtttccgcttccagccctttggtcgcccacaccagacgcgcatcaggacgcatcagtggtttaatctggcgcagcacttcaccaaagacatggctgggtacgacgacgagaatattacggctggctgccagcgcagtggcgagatcgctttcaagatggagcgtatcgggaaaaggcacatcggggagaaacgcggcgttacagcggtcgcgttcaagcgttgcgatatgttcagggtcatggccccagaggacaacctcgtggccatttcttgccagggtgatggcaagagcggtgccgtagctgccggcaccgatcacagtcatactagcattacgttggttcatcaggcatcctgatgttcttcagtaccttcgccagcctgctgctgcaaatagttcatgaacagcgcatcgaagttaaccggcgcaaggttcagttgcgggaatgtaccgcgggataccatgctggtgatgcactcacgagcatacgggaacagaatgttcgggcagtatgctcccaggcaatgcgccatctgggtgccttcgatacccgcgatggagaaaataccgccctgctgaacttcacacaggaacgcggtttcttcgcccaaagaggccgttacggtaacacgcagtaccacttcgtatacgtcatctgccagttgggaagatgccgtatccagatcaagtttaacttctggttgccaatctttctggaaaacgtgcggcgcgttcggcgcttcgaaagagatatccttggtataaatacgttggatctggaaagtcatttcagtgttgttttgttcactcatgtgtagaaaacccttaagtgttgtccttaaatactgcgcaatgtaatgccaacgttcacacgttatttcagcaggggatccagtccaccacgtgcatccaatgcatacaagtcatcacagccgccaatgtgctgtgcgtcaataaaaatctggggaaccgtggtgcgaccgctgcgtttgatcatctcttcacgcttggcggcgttgccatcgatcggcagctcctggaaactcacgcccttgctgctcagcagtgcttttgcacgatggcaatacgggcaggtttctttggtatagatttcaacattggccataaattagctcctgtttttttaccctgaaatttcatgttgcagggcggcagcaaaatggagtgtccccagaagcttataacaataagtcgctgggggcctaattgcagctaacggcctgcatcatgaaagacgacaggtaaattatttgccgcgcaccaaaggcaagttttcgccagcccagccagcgacgccttctttcagcacgaatacttgcgcaaaaccagctttcgtcagtgcgtttgcaggctcctggcactgcatgccagaaccgtctaccacgataaccggtttgtctttgtgcttctcaagctcaccaacattgttggctttgatttcgctcggcaacagattaatagaacctgcgatatggcctttacggaagtcatcacgctgacgtaaatccacaaccacagcgtcttctttgttgatcagacgcgtagcttcaccacgagtaatcaccttcactttgctggtcaggctcttaaacgtagtcacaagaaccgccaccagtaacgcgatccaggcgatactcagtatgggatgacggccaacaaattgcataatttcttgcatggggggtaacaactcccgacgtagtgattaaaaaaaccaggaaaggagtatacctgcgcggtgcggcaaatacagccagcgcgttaactggaatgcaattttgcggggcgcgacgaaaaaaaagcgtaaatctggcatcggcttgccgcgagcggtcgtatattttgatcttcagaggctattttatcgattcagctgtagtaaaattacgcaaattttgactcttgagtatgaggttgtcgcaatgttggtttctaaaaaacctatggtactggtgattctggatggctatggctatcgcgaagaacagcaggataacgccatttttagtgctaaaaccccggtaatggatgcactgtgggccaatcgtccgcataccctaatcgacgcttccggtctggaagtcggtctgcctgaccgtcagatgggtaactccgaagtaggccacgttaacctgggtgccggccgcatcgtgtatcaggacctgactcgtctggacgttgaaatcaaagatcgcgctttctttgctaatccggtgctgactggcgcggtagataaagcgaaaaacgcaggcaaagcggtacacattatgggtctgctctccgcaggcggcgtacacagccacgaagatcacatcatggcgatggtagaactggcagctgaacgcggcgcagaaaaaatctacctgcacgcattccttgacggtcgcgacactccgccgcgcagtgctgaatccagcctgaaaaaattcgaagaaaaatttgccgcgctgggcaaaggccgcgtagcgtccatcattggtcgttactacgcgatggaccgcgataaccgttgggatcgcgtagaaaaagcttatgacctgctgactctggcgcagggcgagttccaggccgataccgccgttgctggtttgcaggctgcttatgctcgcgacgaaaatgatgaattcgtgaaagcgaccgttatccgtgctgaaggtcagccagacgcggcaatggaagacggcgatgcactgattttcatgaacttccgtgctgaccgcgcgcgtgaaatcactcgtgctttcgtgaacgctgatttcgatggcttcgcgcgtaagaaagtggttaacgtcgatttcgtgatgctgaccgaatacgccgctgacatcaaaactgcggttgcttacccacccgcttccctggttaacaccttcggcgagtggatggcgaaaaacgacaaaactcagttgcgtatttccgaaaccgaaaaatatgcccacgttactttcttcttcaacggtggcgtagaagagagcttcaaaggcgaagatcgcattctgatcaacagtccgaaagtggctacctacgatctgcaaccggaaatgagctccgcagagctgaccgaaaaactggttgcggccatcaagagcggcaaatacgacaccatcatctgtaactatccgaacggcgacatggtaggtcacaccggggtgatggaagcggcggttaaagcggttgaagcgctggatcactgcgtggaagaagtcgcgaaagcggttgagtccgtgggtggacaactgctgatcaccgctgaccacggtaacgctgagcagatgcgcgatccggcaacgggtcaggcacacacggcacacaccaacctgccagttccgctgatttacgttggtgataagaacgtgaaagcggttgaaggcggcaaactttctgacatcgcgccgaccatgttgagcctgatgggtatggaaatcccgcaagagatgactggtaagccgctgttcatcgtggaataatccctccccatgaggggaaaggcgattaataccatgacacgggccgtgaaaccgcgcaggtttgcaatcaggcccatcatctacgccagcgttcttagcgctggcgtattgttgtgcgccttttccgcccacgcggatgagcgtgaccaactcaaatctattcaggctgacatcgccgcaaaagagcgcgcggtacgccaaaagcaacaacaacgcgcaagcctgctcgcacaattgaaaaagcaggaagaagcgatctctgaagccacccgtaagctgcgcgaaacgcaaaacacgctcaatcaactcaataaacagattgatgagatgaacgcgagcattgccaaactggagcagcaaaaagccgcccaggagcgcagcctcgccgcacaactggatgccgcattccgtcagggcgagcataccggtattcagctgattctcagcggtgaagaaagccagcgtggacagcgtttacaggcttatttcggctatctcaaccaggcgcgacaagaaaccattgcccagttgaagcaaacgcgtgaagaagtcgccatgcagcgtgctgaactggaagagaaacagagcgagcaacaaacgctgttatatgagcagcgcgcccaacaggcgaaactgactcaggcgctgaacgagcgtaaaaagacgctggcagggctggagtcttccatccagcaaggtcagcaacagttgagcgagctgcgcgccaacgaatcccgtctgcgtaacagcattgcccgtgcggaagccgcggcgaaagcgcgtgcagaacgagaagcacgtgaggcccaggcggttcgcgaccgccagaaagaagcgacgcgcaaaggcaccacctacaaaccgaccgaaagcgaaaaaagcctgatgtcccgtaccggtggtctgggcgcgccgcgtggtcaggcattctggccggttcgcgggccgacgctgcatcgctatggcgaacagctacagggtgaattacgctggaaaggtatggttatcggtgcttctgaaggtactgaagttaaagcgattgccgacggtcgggtgattctggctgactggctgcaaggctacggtctggtggtggtggttgagcatggtaaaggcgacatgagtctttacggctataatcagagcgcactggtgagcgttggtagccaggttcgcgcgggccagccgattgcactggtgggcagcagtggcggtcagggtcggcctagtctctatttcgaaattcgccgccagggtcaggcggtcaatccacagccgtggttgggaagataagttttgtttccatttcgtcgtaacgttcttgcatttgccgctctgttggcgctctcctcccccgtacttgctggcaaacttgccatcgtcattgatgattttgggtatcgcccgcacaacgaaaaccaggtgctggcgatgccttccgctatctccgtcgctgtattacccgatagtccgcacgccagagagatggcgaccaaagcgcataacagcgggcacgaagtgttgattcatctcccgatggcaccgttgagtaaacagccgctggagaaaaatacgctacgcccggagatgagcagcgacgaaattgagcgcattattcgtagtgcggtcaataacgtgccctatgccgtggggatcaacaaccacatgggcagcaagatgacctctaacctgtttggtatgcagaaagtgatgcaggcgctggagcgttacaatctttacttcctcgacagcgtaaccatcggtaatacccaggcgatgcgcgccgcgcaaggcactggcgtgaaggtgatcaaacggaaggtattcctcgacgatagccaaaatgaagcggacatccgtgtgcaatttaatcgcgcaattgacctggcgcgtcgcaacggtagcaccattgccattgggcatcctcaccctgcaacggtacgcgtgttgcaacagatggtttataacctgccgccagacattacgctggtgaaagccagcagcttgctgaatgaaccgcaggttgatacttctacaccgccgaaaaacgctgtgcctgatgcaccgcgtaatccgttccgtggcgtgaagctgtgcaaaccgaagaaaccgatagaacctgtttatgctaatcgcttctttgaagtattaagcgaaagcatcagccagagcacgctgatcgtttacttccagcatcagtggcaaggctggggcaaacagcccgaagcggcgaagtttaacgctagcgcaaattaattagcgcaaattaaaggcgctacgcgtaatgcgatggtggctccgcgttttgtcgcgccattgccataagcggaaagaccacagtaacgcctggtaaccgaccttcacgctgcgcacattggtaatcaggcgcttatacataccggaagtaaatatctcggcaatcatccgttggcgggtaagaatatccggctctttgcgcaccgcatggcaaacacgcaatgcctcgtaagttatttgctgatgaaattccggataaatcataattttgtcggcataatttcgatttaatttctccagcaggcgggtaatcttaatatagtgacgttgataattaaggtttttattcccttgtctatgcaaccgactcacactcgtattatgcagataatatttatataaactttgctcggtatatcgcgcacgcagcgcgttaaacatgaattctgttgtccagacaatatcctgatgatgtaatccggcaataaatttaatgttatttttaacaataacatcacggcgataaacccccatccagacaacgtgagtccaacggcggctagaaagccccatccgcagccagtccgggccggttaatacgccggtactgcgaaggcgatcggtggggatggattgccaggtttctcccgtttcacgaaaacaccagtcagcgttgcactgcgccacgtcgaggtcgtcctctaacgccatggtcatcagcgtttcgtacatggtgggatagacttcatcgtcagcatcgacaaaagcgacatatttgcccgttgccacttcaatcccacgattacgcgccacgcttgcgccagcattcgcctgatgcaacaaacgaacgtgcggatagttttctgcgtaatactttgctatttcaacagaattatccgtactaccatcgttaataataatgatttccagagcagtccaggtttgcgtaattaaagattccatacaagtgcggaaatcatcgcccgcattatataacggaataataacactaagtttattggtgctgttcatcataaattaccgacgacctctgaagttatcctgacgttttacaggctttgtattaagaaactattaagcctgtgagatattatttttacaggtgagagagtcacttcagggtagagagataatgagagcagctatataagagatcagcacaattacgaactctttattacactgacaggattttacatatttaacagattatcctcagataaaagggctggaataccagcccttgttcgtgttaatcccagctcagaataactttcccggactggccgctacgcatagcgtcaaagcccttctggaaatcatcgatagagaaacgatgggtaatgatcgggctaagatcgaggccagactgaatcagcgccgccatcttgtaccaggtttcaaacatctcacgaccgtaaatacctttaatgaacaagcctttaaagatcactttggtccagtcgatagacatatcagacggcggaatacccagcatcgcaatacggccgccgtgattcatggtgtcaagcatggtacgaaacgctggcggcgcaccggacatttccagaccgacatcaaaaccttcggtcatgcctaactccgccatcacgtcattgagattttctttggcgacgttaaccgcacgggtgatacccattttacgcgccagctcaaggcggtattcgttaacatcagtgatcaccacattgcgtgcaccaacgtgtttcgccaccgccgctgccataataccaatcgggcctgcaccagaaaccagcacatcttcgcccaccagatcaaagctcagcgcggtatgcacggcgttaccgaagggatcaaaaattgcggctaagtcatcggaaatattgtcggggattttgaaggcgttgaatgccgggatcaccagatattcggcaaagcagcccgggcgattaacaccaacgcctatcgtgttgcggcacaaatgggtacgaccaccacgacagttgcggcaatgaccacaggtgatatggccttcgccagaaacgcgatcgccgatcttgaagcctttcacttcctgaccaatacctaccacttcaccgacatattcatggcccacgaccatcggcaccgggatggttttttggctccactcatcccagttatagatgtgaacgtcagtcccgcagatggctgttttacggattttaatcagcagatcgttatgcccgagttccggtacaggaacgtcggtcatccagatgccctcttccgctttcagtttggataacgctttcatctcacatcctcaggcgataacgcccagttgtttaccaatacgcgtaaatgcttctactgcacgcgtaatttgctcaggggtatgcgccgcagacatctgggtacgaatacgcgcctgacctttcggaacgaccggatagaagaaaccggtaacgtaaatgccctctttttgcagctcacgggcaaatttctgcgccactaccgcatcaccaagcatgaccggaataatggcgtgatcggctcccgccagggtaaagcccgccgcgctcatttgctcacggaactgacgcgcgttcgcccacagacggtcacgcagttcgctgcccgcttcgaccatctccagtactttgatggacgcggcaacaatggccggtgccaggctgttggagaacaggtacggacgagaacgctggcgcagccactcaaccacttctttgcgcgccgcggtataaccaccagaagccccgcccagcgctttaccaagcgtaccggtgataatatcgacccggcccatcacatcgcagtattcatgggaaccacgaccattttcaccgacaaaaccgaccgcgtgggagtcgtctaccatcaccagggcatcatatttatctgccagatcgcaaacgcccttcaggttggcaatcacgccgtccatactgaacacaccatcggtggcgatcagcacatgacgcgcaccggcttcacgcgcttctttcagacgtgcttccagctcctgcatatcgttgttggcatagcgatagcgtttagctttgcacagacgcacaccatcaataatagacgcgtggttcagtgcgtcggagataatggcgtcttccgcacccagaagcgtttcaaacaggccaccgttagcatcaaagcaggaagagtagagaatcgcatcttccatccccaggaaggccgccagtttttgttcaagctctttatggctgtcctgagtgccgcaaataaaacgcacgctagccatgccgaaaccgtgagaatccattcccgcctttgccgccgcaatcagatcaggatgattcgccagcccgagatagttgttggcacaaaagttaatgacgtggcttccatcagccacagtgatatctgcttgctgcgcagacgtaataatgcgctcttctttaaacaacccttccgcccgtgcggtttccagatcgttggttaactgctgataaaattctccacgcattgcgattctccagacagggcaaattccagcacatattacccaaacttataggtcgcgacgagataacgcgttaacacttctgcaaaattcaggataaataacgtgtaacttgatgtctctcaacacctacagatagtagaaaaactgtacagttttggctgggcataatgatgattgattttactgcattgatataaaaagaaaaaatgatgccaaagcatcatttttcctatctcagttggtatcaaaacgctacccactaatggagggaaacttattttctactaaggaaaattctcagcgcctgcatttttgcccctaaagtgttactcctgaagcagcgaaacaaatcgaaccattttcctctccccagatagtttaggttgaagagatcggggcgtttgtaatagcacatgacaaaaatgccctggtcatcgtccacaatgttattatttagtgttattttttgactttccagaactaatttatagaattctttccatttatgctgactaccaacaattgcgcccccaataatatatacatgattgccaatcatgaaatcaaaaacctgttgttgagatgtgacagtaagccctttttttatagtgaaaagatgcatcttactttcatcaaatgggaaatcccaaattttcaatcctcgagttacatttggcttatggcaatagccaaaatctatccacgcaacaagaggcgttttcactaagcccatgttgatagctttatttacaaaataggccttaaggttacataccaaaacatactctggactccagtactctgggttttttaattgtcgaggctcaagtctatttgtaaagctctcatctttttgaattttttcgatacgacttctgatatatctaaatttcttttttatatcgataacgataaccgttgttggttttccgttgcgaatcgcttcaacccttggtttcaaatcgggagaagtgaaaataatcatctcattttcaagtgcggccagacgctcaaagtaactaaaataaacatcaacactacgagctagtttttcacggaaccctttattagcagtccaatcccctctaccaatgtcaaaatatgcagtgataattgtggtggaacttttcattactaataagaccattaatataaaaaaagaattatatcataaatattaatagaatgtatactgtatattatccattcaaatgcttccgttatttatcatacatcggaatattgatactaaagcactattcacatgcaaaaccaacatccgccatgaaggactagctaaaacccaaactagtttgttgcaattagcatccttgcacctctatgtaaagggctgaagggattcggatgtgatggtatgattacagacattcgtgtctgagattgtctctgactccataattcgaaggttacagttatgatcatcgttaccggcggcgcgggctttatcggcagcaacatcgttaaagccctgaatgataaaggcatcaccgatattctggtggtggacaacctgaaagacggcaccaagtttgtgaacctggtggatctgaatatcgcagactatatggataaggaagacttcctgatccagattatggctggcgaagagttcggcgatgtcgaagcgattttccacgaaggcgcgtgctcttccaccaccgagtgggacggcaagtatatgatggataacaactatcaatactccaaggagctgctgcactactgcctggagcgtgaaatcccgttcctgtacgcttcttccgcagccacctacggcggacgcacctccgactttattgaatcccgcgagtacgaaaaaccgttgaacgtctacggttacagtaaattcctgtttgatgaatatgttcgtcaaatcctgcctgaagcgaacagccagattgttggcttccgttatttcaacgtttatggaccgcgtgaaggccataaaggcagcatggcgagcgtcgctttccatctcaacacccagcttaacaacggtgaaagtccgaagctgtttgaaggtagcgagaacttcaaacgcgacttcgtctatgtgggcgacgtggctgatgtgaatctgtggttcctggaaaatggcgtttccggcatcttcaatctcggtactggtcgtgcggaatccttccaggcggtagctgatgctacgctggcttatcacaagaaaggccagatcgaatacattccgttcccggataaactgaaaggccgctatcaggcgttcactcaggcagatctgacaaatctgcgcgcggcgggttacgacaaaccgttcaaaaccgttgctgaaggtgtaacggaatacatggcctggctgaatcgcgacgcataagagctctgcatgaaaatactggtgatcggcccgtcttgggttggcgacatgatgatgagccaaagtctctatcgcacgctccaggcgcgctatccccaggcgataatcgatgtgatggcaccggcatggtgccgtccattattaagccggatgccggaagttaacgaagctattcctatgcctctcggtcacggagcgctggaaatcggcgaacgccgcaaactgggtcatagcctgcgtgaaaagcgctacgaccgcgcctacgtcttacccaactccttcaaatctgcattagtgcctttcttcgcgggtattcctcatcgcaccggctggcgcggcgagatgcgctacggtttactcaacgatgtacgcgtgctcgataaagaagcctggccgctaatggtggaacgctatatagcgctggcctatgacaaaggcattatgcgcacagcacaagatctgccgcagccattgttatggccgcagttgcaggtgagcgaaggtgaaaaaagttatacctgtaatcaatttagccttagtagtgaacgtccgatgattggtttttgcccgggtgcggagtttggtccggcaaaacgctggccacactaccactatgcggagctggcaaagcagctgattgatgaaggttatcaggtggttctgtttggcagcgcgaaagatcatgaagcgggcaatgagattcttgccgctttgaataccgagcagcaggcatggtgtcggaacctggcgggggaaacacagcttgatcaagcggttatcctgattgcagcctgtaaagccattgtcactaacgattctggcctgatgcatgttgcggcggcgctcaatcgtccgctggttgccctgtatggtccgagtagcccggacttcacaccgccgctatcccataaagcgcgcgtgatccgtttgattaccggctatcacaaagtgcgtaaaggtgacgctgcggagggttatcaccagagcttaatcgacattactccccagcgcgtactggaagaactcaacgcgctattgttacaagaggaagcctgacggatgcgggttttgatcgttaaaacaagcagcatgggcgatgttctccatacgttgcccgcactcactgatgcccagcaggcaatcccagggattaagtttgactgggtggtggaagaagggttcgcacagattccttcctggcacgctgccgttgagcgagttattcctgtggcaatacgtcgctggcgtaaagcctggttcagcgcccccataaaagcggaacgcaaagcgtttcgtgaagcgctacaagcagagaactatgacgcagttatcgacgctcaggggctggtaaaaagcgcggcgctggtgacgcgtctggcgcatggcgtaaagcatggcatggactggcaaaccgctcgcgaacctttagccagcctgttttacaatcgtaagcatcatattgcaaaacagcagcacgccgtagaacgcacccgcgaactgtttgccaaaagtttgggctatagcaaaccgcaaacccagggcgattatgctatcgcacagcattttctgacgaacctgcctacagatgctggcgaatatgccgtatttcttcatgcgacgacccgtgatgataaacactggccggaagaacactggcgagaattgattggtttactggctgatagtggaatacggattaaacttccgtggggcgcgccgcatgaggaagaacgggcgaaacgactggcggaaggatttgcttatgttgaagtattgccgaagatgagtctggaaggcgttgcccgcgtgctggccggggctaaatttgtagtgagcgtggatacggggttaagccatttaacggcggcactggatagacccaatatcacggtttatggaccaaccgatccgggattaattggtgggtatgggaagaatcagatggtatgtagggctccaagagaaaatttaattaacctcaacagtcaagcagttttggaaaagttaagtagtttataaaggtaaaacatgctaacatcctttaaacttcatagtttgaaaccttacactctgaaaagtagtatgattttagagataataacttatatattatgtttttttagtatgataattgcattcgtcgataatactttcagcataaaaatatataatatcactgctatagtttgcttattgagtctaattttacgtggcagacaagaaaattataatataaaaaaccttattcttcccctttctatatttttaataggcttgcttgatttaatttggtattctgcgtttaaagtagataatagcccatttcgtgctacttaccatagttatttaaatactgccaaaatatttatatttggttcttttattgttttcttgacactaactagccagctaaaaagtaaaaaagagagtgtattatacactttgtattctctgagttttctaattgctggatatgcaatgtatattaatagcattcatgaaaatgaccgcatttcttttggtgtaggaacggcaacaggagcagcatatagtacaatgctaatagggatagttagtggcgttgcgattctttatactaagaaaaatcatccttttttatttttattaaatagttgcgcggtactttatgttctggcgctaacacaaaccagagcaaccctactcctgttccctataatttgtgttgctgcattaatagcttattataataaaagtcccaagaaattcacttcctctattgttctactaattgctatattagctagcattgttattatatttaataaaccaatacagaatcgctataatgaagcattaaatgacttaaacagttataccaatgctaatagtgttacttccctaggtgcaagactggcaatgtacgaaattggtttaaatatattcataaagagtccttttagttttagaagtgcagagagtcgcgctgaaagtatgaatttgttagttgcagaacacaataggctaagaggggcattggagttttctaacgtacatctacataatgagataattgaagcagggagtctgaaaggtctgatgggaattttttccacacttttcctctattttagtctattttatatagcatataaaaaacgagctttgggtttgttgatattaacgcttggcattgtggggattggactcagtgatgtgatcatatgggcacgcagcattccaattatcattatatccgctatagtcctcttactcgtcattaataatcgtaacaatacaattaattaagaataaacaagtttaagaagtgagttaaaactcacttcttatctatacaacttaatctctttacactattagttaaagtttcagtatcgatatcttttaccgtatatgttggggatactatttgtatagatttatgatgattcggggaccaaattaaatggctgggatattccggagtacgactattagggtaaaatgcaagcgttggtttatgataagccgcagcgatatgaacaagagctgtatcaacagaaatgacaaaatcactatacttggtcaacgcaacggtataaataaactcatcaaatggtagtgtttcgatttcaagtattggtattgtcaataaatcttgcggtaacccggtaaatataatccgataattttcaaagtgtgttttcacttcttgatatataacttttatttgctcaaacgtaagacggcatattttttttgcacctaatggattaataatgactattcttgtatctccaataaattcttttattttatcttcaacatctactggtaaatgcaagtcgtagttggtggaaaatttaccctcaccataaatatgcttcagtatttctattgctcgtgtactcatatgttcttttaaacattcatcgtggggatggtaaaaactatagtaacgcttataccaatgatcaaaacccagaatgtaagaatcttttaaactacttaatattaagctatgcttaaaactgggcatagtttcaaaggggtctaatacaatatcgaactgtaaatcccgcagatgcttacatagagtaagcatttcaagaaaaccggtactttctttaatacagaactcaaatatatttttattattagagagaaattccccaccctttctatttgtgagaagagttattttaacccctttactataaagttcacgataaatgctacttaatacaattagatcaccaagtttattattatcatgaataataaggcaacttttaacttgtgctggatctgtaatttgattatttattttattacgaaataaaaaagaaaggaaattaatcttgattttgtttatataaaatcttttctttttgtgaaaagttcctaagcgcatttttataccatattattttagtttcaggatgattaattagcataagaatcggtactagttctatattgcattttttttcttgtcatatctttactttcttctgcactgatgtcttgaagtttaataaatggaattacatcgtaagaaatagctgtatcatcacttaaattataaatattaatatcttttacattatcatgcataaaacgaaaaaatggcaatattttgaataaatccctacttaattcgctgggcatgggatttttattctcatcatagaaacgagaacagctacccgttaaatcaagaccagaacaaataatccgcgcatacttaagactatatgcgatttgaattgcagcaaaggcaatagtatggcaactgcaataaccaagactaatgtccttgcaaaatccaaccagacgaccttttttagacaacggtacagagatcagcagttctttgtgaatctgtctcaaaatattaaatttaatcttctttataaaaccacctttttcccgacggtaaaaggaccgtaatacgaggcagttctggaggatataaagtttatcttctttggaagcgtgttcataaacgtcaacgtttactatggtataacgacttctctggctaaatttataaaaatcatcacgacgctgatgtaaaaatcggacatctgtaagtacatatataaaaggaacgatattattacttaacagatattgcgcagaaccattgacagcaataatatcctttgttcgtaatacactcaaaggtgttttttggcttgtagggccgctaagaaaaataataacatcatcagatattttattttcaatcaggttttcaacatcttttttgtcaatgtatctaatattcttcatgataaacctgtgaaataaataactccgcttaaaactgtcctggtgaagacatgtaattgtgggattttttttagcgcgctggtttccctttcaaacgccgcataaaattgcgcatttttttacgatatactaaaagataatagcctagatctctaatctcatttttaataccgtaatgacgctctaagtcaatacgatctttcgctttacgctgcgcactagcacgctttccggagagatcgataattcgaacctcaccattttttataatgaagttaccacgatgggggtcgccagaaaccatgccatgttgatgtaaggcattaatactttgctgaattttattttttagcgcatcatcaatatcgggcatatcacacaactctatgccatcaatatactcgatgatcatgatataagtatggacaaaacgtaaggttttccgttcagccaataaataaaagtcattgagtgtatttaacccttcatttcgtactttttgggtttgctcaaaaaggcgttcgtaataatcaccttttaacagagacttaaagaaacgttcgttacgcttaactttcggagaaaaaaccttaagaatcaatttaccgtaatcggtatcaataagcataacttttgtatcatcaatagaacgaaaaaccttgatgatatttatattataagacaagaagtcatttaatacattgaggtacttactattgttttcatcggtaaaaacaaccaagtctttgatcttgctcttctgaatcataataaaccagttaaatgttatttacggtaatattttcggcaaagataacagactcctgctataattcctgagatataatgatgttgcactaaaagatgtttatatcttttttaaattcaataattgatttcgcatctcgtggagagtcatctttccagggggaattttctaaagctattttatagtattttaccgatggataaattgcccatttgtgccacggtttagttgcacctgtataatgaataagaagagtactttctgtaatcagctttttatagttttgatgtgttttgtcttttaattcacttttaattgtataaattgtattgtactcacgaggcaaaaataatgtcatccctttcagtaagacattcataacatcctgatcagggtatttataaacattatctttactcataagaatagacaacgctttttctgttagttttgcgtcagcccattttcttaagtctaaataaacgacaccggaattaaagtactgcccaagtaattcaggatcagacaacctggataccgccttttcttgcattggctcaacatctttaacaacagcagcaaccgctccatttaaacccagatgtaatagttggctaatatcgcctttacaaacaacatctgcatcaagataaagcaaacgatcaagcgttaaacccaataattgaaatgcaaataaacggaagtacattgctcttgaccagacctgtgtacaaggcaagcactggagcttatcagtgttaattctatataacgtgattcttaattggttttgctctgcaagctttgcaattttttgaaaaaaaccatcattataaacatcagcaataatataaaaatcaagattaatatgtcgattatttaggacaattgatgtgatggaaacacctacaccatcaagataattagcatcgacaccataggcaacatttaaacattcagaagtatttatattagctagccgaaaatcccaggctttaactttatctatctctatggcaggaaatgagtccacaatgctacccttatatcattactttatagtttcccagttttaatgctttatcttttcaataaaataaaaaagatagttgctaaatccttttagatatctatgctttttaagcatatgttttgcgctatatcttaattgattgctattgttcggtttcagcaacgccgtattcttccatgggctagcattttttgcctccataaaggcttgacttacaggataatcccaggcccaatcatgccagggcttggttggcccgatataatggataaaaatagtatcgttggttactgggtttataaagctttctttgagttgataatttaagctgaactgggtgttatatttaatatcagcgaaaataagtttatccgccagcaacatatttaacacatcctgatcaggatgtgttatttttttgattatttctggctcatttagcattgcaatagctcgtgcagaaacctgctgagccgcccattgggcagtattaatcaataaaaaaccggagttaaagtaacctttagcaattcccgcaacacctaagctatgggcgcgtttttcccaccagtcagcttgcccttctgtaacaaccattgcgactttatcgtcaggaaaactgaaattaattagtggctcaatagtcccctgacaaatgatatctgcatccagataaaggactttaggcgccttattaataaagtaatctgcaataacaaaacgaaaatatattgcatgagtccaattcttagtgctaggcaaactgcgcagtcgatcaccattaatcagatatattttaattctggttttatactgcaacgccagggcatcaaaatacttacgatcatcatcaccaaaataatcagtaaaaatatggaaacacaatcgacttccttcattatattttaatatactagcaatgctaattccgcaaccaaatagaaagtttttgtcagttccataagcgatgtccagacaaagattttctgtttctactttatgatcataatcaataacactattaagaaactcagtttcctggaaaaacacctgctgcattatttcctccgggaaatagcagaaataattaccttatgtaatctatcgtaatacttgctttggtaaaattcatcgatgctcgcaggaattttttcatgttcgatatgaatttcacctgctatatatttatttagaagagttacaaaaccagcaatatctcccggttgatacagatggccattgacatcaggttgaataatgtcagcaggcccggagacacaatcggcactgatacaaggaatcccccagctcaaggcttcaagtagggtcattgggaaaccttcaaaagaactcgtgagcaataacgcactcactttttcaatatcttgctggaccaattcccagggatattgttgccaaccataccagacaattcgatcatcaatatttaattctctaccataagcctggcatttttcgaaatcggagccatcacccaatacatggagtttccagttacctttcgcttgacttaagccatcaagcaggtctttaactcttttctggccttcaaatttcatacgcccaacataaataaacgttgccgtttcaccttcctcgggcgcgggaatgacactgtctttagtttcgacgggattaaaaataacatttatcgtgctttctgctacacctcgattaatcatttgctgtttaatgccagagctgattgctaaatgatagtcggcacaggtgatatattcagcatgttttttgtgatctaaagaaaaatgtggccaactaaatactggcatatcaattccactttttttacgtgcttttgcggcaaacaggcaggagatcacatcaatacaaataacgatatctggttggtactcctgaagccatttacttagagcatgaatatgtttcgcccgacgcaaaaaacctaaacgaatattggaaaaactacaactgtatttaataccttccagccatcccttatccattttgtcattacgacaaaagaaaaacatttcactttggatatgttgttgcctgaaggtagtaataacatcacggatgacagtttccatgccgccaaatccagaaacagcttcgccgataaacgctattttcatagaaactctcattaattgagtaaaactcactgttttaacggttttatttgtctataaaatcagaaacaatcgtactcatcattttatctggactgaatttatataaactatcataatccattggtttaacagaactgttaataaaatactctaacttatcccaatcatcatgacctattataaaaaagcgagattcactatagatttcactaccaaatacatttatattattagtaattaattttttattgaaaaatagtgcctcaagtatacgaagagtccagccagattggttttctttggttatatcaacaattatattagcatttaatgttcttctaatattctcttcataagatatttgtttttcaatcaaatacttactagtcgtagaacttgtcttatctttgacaacattaaaatctagcttacatcctagtgttgttaatctctcggctaactcattaattatttgaagacgccctttatcacgaccaaggaaaaaacatattggctggctgttatttttgtcagataaactataatttctaatttcatccattcctataggaaaaaattgttctattgccttgatcttttcattccctataaatctatgctcaaaatcatatataatatcgaaataattcgcgttatcaagaataaaatcttcgccaacagtatttcttagaagcaaaactttatgacagttaatattttttaatatttgtttattgatacctttattaacaacactgtcattaatgataattatgtcatcttttttaatatcattgaggtaatgcttgatgaataatcgccccagccatgcattatccatccctattttacttatttttttattaatccagttatatttttttggtgttgttatattttttatcttgtacttttttttcaggtactgaatcatttttaattcataatctgcaacccaatttataaaataaatagtcataataaagttagttccagtacatactaataaatatttttataatcctttgcgttgtgttcgctctttaatacgctcggccttaacgcttgccatgttcaataaattctgttcaagagacaatattttgcgtaaaggcatcccaaaataaaccttcataaatcgccagatatctctttgcgtcaggccaatattcatactactgaaatataaaccaatcaggtctttatcgcgccagcggcgcggtacttttgcacgtatctgtgcccgatgcagatcgataacactaatttttaattcatcttcccggccagtaaatggcaaatgaagcaaaaagtggcaaatgtaacagtcgcggtgatttatccctgcagtatgcattttacgcaccatagttgctacacgtgcgatcagcatacgcttaacacgtatatcaggcgggttgactgcccaatcggcacaataatcttcaaggctaattgtgggagtgagatcttcggtaataataaaacttgcgcgagttaatggatttaaccctttttcgccaaacccaatgcccttcattgtatcaacgccaacatcactcaggcgatgaatagcgtgccactctctgtctgcgcccaaaacgggcatccgcaaactgagtagattttttataatctcttttaatgtcgtccccttgtgccatttaagaaaatagcttttcccggacagttcaaagcgtaatgtacgacgagtctccagttcacgaaagacctcgccgttcagttttttgacctctgcaaaagcatctttaccacgccaaagtgtggcaagcggctcttttaattcaaccatctaaaccacctgtaatgatatccgcggctttttctggcaagctatacaaatcctgagtatcggcataatggcgagcattctccgcccaggccattcgcaatgggctctgagttaacgctttacgtaaaacttcatttaattgttcctgagagaaaggttcagcgatgaccgttccacaattggcatccgcaatataatgcgcgtacccacataccgctgttgttaaaacaggtaacccagcagtgatcgcttctagaagaacgatacccgcggcttcctgataagcgggatgcagtaataaatcagcggctgccattaattcactcacatcattgcgaccggagaagaaatgcacattgctccgcacgccgagtttttctgccagcgcttcaaattttcgcggcttatcctgaccaacaacaaataaaagcgtattgtgacgtaaactttccggtaagcttgccaaagcttcaatactgcgatctacacctttacggccaaaatcacttccaacctgcagtaataagttttgttgctcttttatgccatttttctggcgataaatttcacggctgtttgggatttgctcactgtattttctgtccggataaataccgggaggaagaatttgaaaacgttcaggttcagtttgataatgcttctggaaatcggcgatttgcttatcggtcagcatcataagtttcgtgcttttaccctgctcgaaagtcgctcgctcaaatgcggcataatggcgatatcgacttgttaaacgatataaaaaacctttttcttgcgcaactttctcggcgtaacaaacatcagcggcaaaataaacatccaggccaggcatcttattaaacccaacaacgcgatctgcgggatgctctttgagatgattttgtacccaggcataatattctgcattgcgtccatggttggtatgggacttaactggcacctgaataagctcaaatgctttcgggcaatcgccttcccagctctgtgtatatacccgaacatggtggccccgtgcggcaactgtacttgcaatgcgcataaagtcacgttgaagcccaccaaatggaaaatatttatataaacaaaacgccacgatcataattgtgcattcctgtcagcactaggggcatcttctggcaacagcttttccgtagcggcgatcacatcctccgctgggataacagaaagatattttttgttgcggtcaagttcatgccgggtcggcattttctgataattccccgcccagaattgaataatattctcggtccagggacgccagaatacgtgatccgttgcaccaaatagactaatgactggcgttttcactgccgctgcaatatgtcccggcgcagaatccacaccaataaaaagcactgcatgatcaattaatgcacccagttcaggaaaacgtgttttacctgcaaggccagtaatgggttttgtttcgcaacctcgtgcaatctcatctacacaagcgagatcatctgcgctgggcccacaggttagcacaacctgatagcctcgctgttgcagcgcatcgataaccttagaaaatttatcgttatcccaacacttaaatatctgacgcgctgtcggttggatgacaacataatgatcttttacgcccagggcatctaattcccggcgcatcttcttccagcaatcttcggcgtaactcattgttgtgtcggtgtagaaatcggtaatacctaatggctcaaggacgcttaaattacgctcaacaatatgtgtaccgtgtattggcgctaagtgtgtgaagctttttttccaaataccatgctgccgatgaccataaagttggcttattttcatccgtgcaggtaaacaacgtaccagcagcgccaccatccactgatccgtaagattaatgaccaggtcataattattcgcacgcagagtttttatcaagctaagcacatttttaattttatcgaaagttcccgcacctttattgcttatcccatagagcgcattaatttccgggttttcagacaaaatagggatggtgtcctgataaagcagcatatcgatttttgcatcaggataattctgcttgagcgtactgatgacaggagtagttaataacatatccccatgatatcgcatctttatgaccaggatttttcgaaatggcttttccactagcgactcttttgtgtgattgtctggttaagttaagcagaaaaaagcacgctaccgccccaggctcaacagctacctgaatactgataacgcacttactttgacgtgctagtgtatcatttctttcgcagcaatccgacccgaatgatttttatacacaaaatatactttaatcataaaaatcaaatagataaaaaatagcatttcgataatgtcagtacggcctatgtagatttgaaaatggggccgagtttcaatgaatcgcataaaaatacaaaaaaaatgaagatgtagcggcagatcagaccaaactgaagctatttaagtcaaaaacgggaaaagtaatggtaaagccacagctaaatacatagaatccccagcacatccataagtcagctatttactatgctcgaattgctttacaccgcccttctctaccttattcagccgctgatctggatacggctctgggtgcgcggacgtaaggctccggcctatcgaaaacgctggggtgaacgttacggtttttaccgccatccgctaaaaccaggcggcattatgctgcactccgtctccgtcggtgaaactctggcggcaatcccgttggtgcgcgcgctgcgtcatcgttatcctgatttaccgattaccgtaacaaccatgacgccaaccggtagcgagcgcgtacaaagcgctttcgggaaggatgttcagcacgtttatctgccgtatgatctgcccgatgcactcaaccgtttcctgaataaagtcgaccctaaactggtgttgattatggaaaccgaactatggcctaacctgattgcggcgctacataaacgtaaaattccgctggtgatcgctaacgcgcgactctctgcccgcagcgccgcaggttatgccaaactgggtaaattcgtccgtcgcttgctgcgtcgtattacgctgattgctgcgcaaaatgaagaagatggtgcacgttttgtggcgctgggcgcaaaaaataatcaggtgaccgttaccggtagcctgaaattcgatatttctgtaacgccgcagttggctgctaaagccgtgacgctgcgccgccagtgggcaccacaccgcccggtatggattgccaccagcactcacgaaggcgaagagagtgtggtgatcgccgcacatcaggcattgttacagcaattcccgaatttattgctcatcctggtaccccgtcatccggaacgcttcccggatgcgattaaccttgtccgccaggctggactaagctatatcacacgctctagtggggaagtcccctccaccagcacgcaggttgtggttggcgatacgatgggcgagttgatgttactgtatggcattgccgatctcgcctttgttggcggtagtctggttgaacgtggtgggcataatccgctggaagctgccgcacacgctattccggtattgatggggccgcatacttttaactttaaagacatttgcgcgcggctggagcaggcaagcgggctgattaccgttaccgatgccactacgcttgcaaaagaggtttcctctttactcaccgacgccgattaccgtagtttctatggccgtcatgccgttgaagtactgtatcaaaaccagggcgcgctacagcgtctgcttcaactgctggaaccttacctgccaccgaaaacgcattgaggttgttatgcaaaaacgggcgatttatccgggtactttcgatcccattaccaatggtcatatcgatatcgtgacgcgcgccacgcagatgttcgatcacgttattctggcgattgccgccagccccagtaaaaaaccgatgtttaccctggaagagcgtgtggcactggcacagcaggcaaccgcgcatctggggaacgtggaagtggtcgggtttagtgatttaatggcgaacttcgcccgtaatcaacacgctacggtgctgattcgtggcctgcgtgcggtggcagattttgaatatgaaatgcagctggcgcatatgaatcgccacttaatgccggaactggaaagtgtgtttctgatgccgagcaaagagtggagctttatctctagtagcttggtgaaagaggtggcgcgccatcagggcgatgtcacccatttcctgccggagaatgtccatcaggcgctgatggcgaagttagcgtaacgtttatgccggatggtatgccatccggcgcgcatgaattacttctggcactgccgacaataaaacgttgcccgctgcgcatgtttagtcgccacaatcggcgtaccgcacacccgacacggctcaccttttcgcccgtaaacctgcaattcctgagcgaaatagcccggtttaccatcactttgcagaaaatctttcagcgttgtaccaccctgctcaatgctacgcagcaacaccgctttaatcacccgagctaacaattcacactctgccaggctcagactactcgccagccgatccggatggatccccgccgcaaacagactttcgctggcatagatattccctacccctaccaccagcttgttatccatcagccacggtttaatcgccgtttttttcttcgcgcacttctgatgcagatactcaccattgaaatcgtcgctaagcggctccggtccaagatgggtcagcacattatgcccttccagctctttggtccacagccaggcaccaaagcggcgcggatcggtgtagcgcagcactttgccgttgctcatcaccaaatccacatggtcatgcttttcagggggaagttcttctggaaggatgcgcaggctgccagacatccctaaatgaatgataatccagccctcaggcagctccagcagcagatatttagcccgccgctgcacgctaagcactggttggtcgcttaaacggtagatctcttcactaaccggccagcgcaagcgtccgttgcgcaccactgcatgaagaatggttgcaccaacgagatgcggttctatgccgcggcggctggtttcaacttcgggtaattcaggcatagcatctccaggaatgaacagatgcagtcaatatgggggcaagcagataacaaaaaaccccgccggagcgaggttttttgttacatcaaagcgagaattatttgattttcgcttctttgtagatcacgtgctggcgaacaactggatcgaattttttcagttccagtttttccggcttagtacgtttgttcttcgtagtggtatagaagtgaccagtaccagcagaagaaaccagcttgattttctcacgaatacctttagccatgatttatttcctctaagtacttagtacttttcgccacgggcacgcagttcagccagaactgtatcgatgccttttttatcgattacacgcatacctttagcagatacgcgcagggtgacaaaacgcttctcgctctcaacccagaaacggtgagagtgcaggttcggcaggaaacggcgtttagtcgcgttcagtgcgtgggaacggttgttaccggtcaccggacgcttgccagtaacttggcagactcgggacatgtctattctccaaaaatcaaattagctcgagcttcgtatggggtattggcgcctcgtcaggctttacagcccggtcatcgcagttctatgtgaactctcgattgccaggcccaaatgccaaacccgagattctcaaaggtggcgtagtatacgctgactcagcgatgtgctcaagtcccgaacagacaaagatcccgaaggatcgcgcatagcgggttaaatccagccgcgttcggcaaaagaaacatactctccacgcccaatcacgatatggtcgagcacgcgtaaatccatgaactgacaactctttattatccgttcagtaatgagtttatccgctttactgggttcagcacaaccgctagggtgattatgtgcaaggatcagcgcgctggcgtttatttttatcgcttcgcggataatttcccgaggatggacttcaacatggtttagcgtgccggaaaaaagacgcctatgcgttataacccggtgttgggagtcgagaaagatcaccataaagatctcccgctcctcacccgtgagctggctttgtaaaaattccctcgtcatctccgggctgagtaaagggctttcttcacgcatccgcacgttgtagtaacgccgcgccagttcagcaatcccctttaactgggcaaatttcgccacgccaattccatgaacgccactaaattgttcatattcagaggttaacaagccataaagagagccgaaattctccagcatctcttttgccagggttaatacatctttaccgcgcgttccggtacgcagaaatagcgccagcagctcgacatccgttaaggcgctaataccaaacttcagcattttttcgcgcggcatcaacagctgactattgtttttcaccttcacctcctttgtggtgctcgcatcctgtcatagccgtttcgttaaatcgacggccagttttcaatcctggaaagcgcctcgcaaagtgaatctcaggtgaaggcacgacaacaaaagtattgtgataaaatcgccaacttctggtgtcaccctacaggaaaaatcatcatgagcctggccggtaaaaaaatcgttctcggcgttagcggcggtattgctgcctataaaacccctgaactggtgcgtcgtttgcgcgatcgcggggccgacgtccgcgtagccatgaccgaagcggcaaaagcctttatcaccccacttagcttgcaggcggtttctggttatcccgtttccgacagtctgctggacccggcagccgaagccgctatgggccatattgagctgggtaaatgggctgatttagtgattctcgcccctgccacggcagatttgattgcccgtgttgctgccggaatggcgaatgacctggtaagcacgatttgtctggctacacctgcgcctgtagccgtgctccccgccatgaaccagcagatgtaccgtgccgctgccacgcagcataatttagaggtgcttgcttcccgtggtttgctcatctgggggccagacagtggcagtcaggcttgtggtgatatcggtcctgggcgaatgctcgatccgttaaccattgtggatatggcggtagcgcattttagccccgtcaacgacctgaaacatctgaacattatgattaccgccggcccgacgcgtgaaccgctcgatccggtgcgttatatctctaatcacagctccggcaagatgggttttgctatcgccgccgccgctgcccgtcgtggcgcgaacgtcacgctggtaagtggtccggttagtctaccgacgccaccgtttgttaaacgtgttgatgtgatgaccgcgctggaaatggaagccgccgtgaatgcttctgtacagcagcaaaatatttttatcggctgcgccgccgtggcggattatcgcgcagctaccgtggccccagagaaaatcaaaaagcaggccacgcagggtgatgaattaacaataaaaatggttaaaaaccccgatatcgtcgcaggcgttgccgcactaaaagaccatcgaccctacgtcgttggatttgccgccgaaacaaataatgtggaagaatacgcccggcaaaaacgtatccgtaaaaaccttgatctgatctgcgcgaacgatgtttcccagccaactcaaggatttaacagcgacaacaacgcattacaccttttctggcaggacggagataaagtcttaccgcttgagcgcaaagagctccttggccaattattactcgacgagatcgtgacccgttatgatgaaaaaaatcgacgttaagattctggacccgcgcgttgggaaggaatttccgctcccgacttatgccacctctggctctgccggacttgacctgcgtgcctgtctcaacgacgccgtagaactggctccgggtgacactacgctggttccgaccgggctggcgattcatattgccgatcctagtctggcggcaatgatgctgccgcgctccggattgggacataagcacggtatcgtgcttggtaacctggtaggattgatcgattctgactatcagggccagttgatgatttccgtgtggaaccgtggtcaggacagcttcaccattcaacctggcgaacgcatcgcccagatgatttttgttccggtagtacaggctgaatttaatctggtggaagatttcgacgccaccgaccgcggtgaaggcggctttggtcactctggtcgtcagtaacacatacgcatccgaataacgtcataacatagccgcaaacatttcgtttgcggtcatagcgtgggtgccgcctggcaagtgcttattttcaggggtattttgtaacatggcagaaaaacaaactgcgaaaaggaaccgtcgcgaggaaatacttcagtctctggcgctgatgctggaatccagcgatggaagccaacgtatcacgacggcaaaactggccgcctctgtcggcgtttccgaagcggcactgtatcgccacttccccagtaagacccgcatgttcgatagcctgattgagtttatcgaagatagcctgattactcgcatcaacctgattctgaaagatgagaaagacaccacagcgcgcctgcgtctgattgtgttgctgcttctcggttttggtgagcgtaatcctggcctgacccgcatcctcactggtcatgcgctaatgtttgaacaggatcgcctgcaagggcgcatcaaccagctgttcgagcgtattgaagcgcagctgcgccaggtattgcgtgaaaagagaatgcgtgagggtgaaggttacaccaccgatgaaaccctgctggcaagccagatcctggccttctgtgaaggtatgctgagtcgttttgtccgcagcgaatttaaataccgcccgacggatgattttgacgcccgctggccgctaattgcggcacagttgcagtaatatgacgccggatgacttttcatccggcgagtttctttaaacgccaaactcttcgcgataggccttaaccgccgccagatgttccgccatttccggcttctcttccaggtaagcaatcaggtctttcagggtgatgatagagatcactttgcagttgtaatcacgctcaacttcctgaatcgcgctaatctcgccgcgcccgcgttcctgacgatcgaggctaatcaacacgccagcaagcgtcgcgccattggcctgaataatctccatgctctcgcgaatcgccgttccggcggtgatcacatcatctaccagcattacgcgtccttgtaacgcgctaccaaccagattgccgccttcaccgtggtcttttgcttctttgcggttaaagcagtacggcaggtccaggtcgtgatgctccgccagtgccacagcggttgtggtggcaatcgggatccctttgtaagcagggccaaacagcagatcgaactcaatgccggaatccaccaacgcttcagcgtaaaaacggcctaacagtgccagatcgcgcccggtattaaacagcccggcgttgaagaaataggggcttttgcgcccggatttcagcgtaaactcgccaaactttaacacctgcttgctaagcgcaaattcaataaactggcgctgatatggtttcatgccttcgctcctcatcttacttttctacagacaaaaaaaaggcgactcatcagtcgccttaaaaatcagtttgccagcgccgccttctgcgtcgttacaatggattgctttcccctcgggccagagccaacaagatgagtagctcttcatgggtgaacggctcgccttctgccgtcccctgcacttcaatgatgcgcccgtcttcggtcatcactacgttcatgtcggtctctgcggcagagtcttcaacgtattccagatcgcaaaccgcttcgccgttcacaattccgacagaaactgcggctaccatccctttcatcggattggttttcagcttgccgttttccaccagcttctgtagcgcatctaccagcgccacgcaggcacccgtaatgctcgcggtacgcgtgccaccatcagcctgaagcacgtcgcagtccagcgtaatggtgaactcacccagcgctttcaaatctactgccgcgcgaagagcacgggcgatcagacgctggatttccattgtgcgtccaccctgcttacctttcgccgcttcacgagcgttacgggtgtgggtagaacgtggcagcatgccgtactctgcggtgatccagccctggccctgacctttcaggaagcgcggcacgccttcttcaatagaggcggtacacaacactttggtatcgccaaattcgaccagcacgctgccttctgcatgttttgtatagttacgagtcagggtaacgggacgcacctgattattgctacggcctgctggacgcatattgaaatctccggcttgaaacaaatgtggctgcgcattatacggacttccggcggttattcctatcctgacaaggcatcgatggctataatccttccacctctccttttataaacaggaacgtctatgatccgcagtatgaccgcctacgcccggcgtgaaatcaagggtgaatgggggagcgcaacctgggaaatgcgcagcgtaaaccagcgttatctggaaacttactttcgtctgccggagcagttccgtagccttgaacctgtcgttcgcgagcgtattcgttctcgcctgacgcgcggtaaagtggaatgtaccctgcgctatgagccagatgttagcgcgcaaggtgagctgatcctcaacgaaaaactggctaaacagctggtaactgccgcgaactgggtaaaaatgcagagtgacgaaggggaaatcaacccggttgatattctacgctggccgggcgtgatggcagcccaggagcaggatcttgacgccattgccgctgaaattctcgcggcgctggatggtacgctggacgactttattgtcgcgcgcgaaaccgaaggtcaggcactgaaagcattgatcgagcagcgtctggaaggcgtcaccgccgaagtggtcaaagtccgctcccatatgccggaaatcctgcaatggcagcgtgagcgtctggtcgcgaagctggaagatgctcaggtgcaactggaaaacaaccgtctggagcaggaactggttctgctggcacaacgaattgacgttgccgaagaactggatcgcctcgaagcgcatgtcaaagagacctacaacattctgaagaaaaaagaagcggttggtcgtcgtctggattttatgatgcaggagttcaaccgcgagagcaacactcttgcgagcaagtctatcaatgccgaagtgacaaactccgccatcgagctgaaagtgttgattgagcagatgcgcgagcagattcagaacatcgaataactcgtaacgccaattcttacttttccgccttcacaaatgccgccactcaaacagagcggcatttttcttccccgcaacattcaattctgttttgcgtgcctgctccagattttgcgatgtttttttgcccagcacactgagaacgtgagatactcacaactgtatataaatacagttacagatttactttctttgcaattgatatcacatggagtgggcaatgaacgaacatcatcaaccttttgaagagataaaactgattaatgcaaacggagcagaacaatggagtgcaagacaacttgggaaactactgggttatagtgagtatcgtcactttatacctgtattaacgcgcgccaaagaagcctgtgagaacagtggtcacacaattgatgaccatttcgaggagatcctcgatatggtcaaaattggcagtaatgccaaaagagcattaaaagacatcgtactctcccgctatgcctgttacctggtagtacaaaacggcgaccctgcgaaaccggtcattgcggcagggcagacttattttgctatccagacccgacggcaggagcttgctgacgatgaagcatttaagcaacttcgtgaagacgaaaagcgtctgtttctgagaaatgagttgaaagaacataacaaacaattggttgaggcagcacagcaagctggggtagcgacagctactgatttcgccatatttcagaatcatggttaccaggggctgtatggtggattagatcagaaagctattcatcagcggaaggggctgaaaaagaatcagaagatcctggatcatatgggtagtacagaactggcggctaatctctttcgagctacccaaacagaagaaaaactcaagcgggatggcgtgaatagtaaacagcaagcaaacaccacacactttgacgtgggtcgcaaggtgaggcaaaccattcaggaacttggcggaaccatgcctgaggagttgccgaccccgcaggtcagcatcaagcagttggaaaacagtgtaaaaattacagagaagaaataacagaaactaaaaactctttttgttgattgagacacccgatgcgtaagccaaggtccaggtgcagtgaacacaatggctaaatattgcacctttcttttccccctcagttttaacctattttttcttatgcattttctcagacaagaagtcagaagaatgcatctctgctacagaaaatagcgatttcacataactacaagttatcaatttcccctccccttaaaaaatctcaatcgtgacaatgcgcacaaatcgctaccctgccagacagatttttagggagagaaccatgctgttacacattttgtatttggttggcattactgccgaagccatgacgggggcgctggcggccggacgacggcgcatggatacatttggcgtaattattattgcgaccgccaccgcaattggcggagggagtgtgcgcgatattctgctgggccactatccgctcggctgggtcaaacacccggaatatgtgattatcgtcgctaccgccgcagtactcaccactatcgttgctcctgtaatgccttacctgcgcaaagtgtttctggtgctcgatgcgctcggactggtggtcttttctatcatcggggcacaggttgcactggatatggggcacggcccaattattgccgttgtcgcggcggtaaccaccggcgtgtttggcggcgttttgcgcgatatgttctgtaaacgtatcccactggtattccagaaagagttgtatgccggtgtcagttttgcctccgccgtgctgtacatcgcgctgcaacactatgtttctaaccatgatgtggtaattatctccaccctggtattcggcttttttgcccgcttactggcgctacgccttaagctgggattaccggtcttttactacagccacgaaggacattaaggttcaaaacctgtgatctgctgggcagccagccaactgcccagcttcttgatttgcgcattttccttccattcaataacctgtctggcgcgtccgcttccagtccccggcagctgctgccagaactgctccgtgctaaataaaagttggctccaggaccgttcatcactggcattaagcgccgcccgggttagcggtattcccattgccatcacccagcgagtaaaaggctgcttacgagccagattaaactgatgccatagctgcgcacttttacttttcgcgatccccggcgtgttctgtaattgctctggcgttaataaaagccaggaaaagatatgttcaaagcgatgagtctgatgcagcgcgcgccaaccggcctcaccaatgccatccagcccaagaacctgttttgcccccagccagactaagcgactaatgaactgttcctgacaaacatcagaagcaaagtagcaggtcaagctgttaaagcggttttctggcggtgtcggttttgtacgttctgcaccgcgccacaccacatcatcaatgcgaggaataccctgaccggcaaggctgacgagaatctgatcaccaggcgcaatatcccactcctgccagcgcctgacggaaccaatattcacccgctggacttttttatcatccagcatgacaggtgcgagactcgcaaccacgcttattttaccgctcttacccaccgcaaactgaattgccttcacttcggcaacctgagctacaggttgatatttccaggccaccagccactctgcctggcccggtagccaatggcgggattctggctctttcgccgctcgtacaactacgccatcggtgacgaagggtaattccgctttccaccactcattgcgtacgcgcgcaacttcatcagcatttttcaccgcacgggtatacgtctgcgttagagtaaaacctgcggtagccagctcttttaaacgatcagacattaactgcggtccatccggccatgcccagacaaaaacgcccagagaattcagcgtgtcgctatcgtcctggcgcatcatcaagccagcaacttttgcgcgggcatttattccccccatttgttgttggatatgcccctcgcgctggagaaatatttccccctgaagcgtactgttggctaaaggcccgctaacggtttgcggcacagcggaaattaagctaactttctgcgtccagtcctcgcctttcaggccattaccgcgactgattgctttgttcagtttcccgtcccgataaaccagggttaccgcaacgccatcaacttttggctgcacccaaagatcgctacgttctcgcatccacagacttaatgcgtttttatccaccattttgcgtacacccgtatgggcaaccggatgcataaccgcaccatttaaaggcggcatcatcacgtcgcggggctcgctcccaaagcagcgttgccactgcgtaagacgggcgcttaactgatcgtaaacaccgtcttccacctcactttttccttccttccagtagtcatcgtcccactgttttatttgctgttgcaggcgggaaatttcttcctgtgctctggctgggctccaggccggacagaccgcccacacagaactttgccagcacaagatacctattaatatcgccatccatactttcatcatcacctccgctgtagatagtcaggcagatatacaacgtgatgaaagcaaagccgagtggcaaaaacggagtctgcgaggacgcttcctgaaaatcgtctttattgcagtgaatgacaggcaaatgcggaagcagctacgcaaaacgcaacaactttgcgcaaaaagtgtgagcaagggctacgtcacatggccgcgccgtgtataataagctcgtatgtaggctttatttcgctaatcacatacgaaagatactcatggctcaaggcacgctttatattgtttccgcccccagtggcgcgggtaaatccagcctgattcaggctttattaaaaacccaaccgttgtgtgacacccaggtttctgttagtcacaccacacgccaaccgcgtcctggtgaagtccacggtgaacattatttctttgttaatcatgatgaatttaaagaaatgattagcagagatgcgttcctcgaacacgcagaagtttttggtaattactatggcactagccgtgaggccattgagcaagtactggcgaccggtgtcgatgtttttctcgatatcgactggcagggcgcgcagcaaattcgccagaagatgccgcacgcgcggagtatctttattttaccgccgtccaaaattgaactggaccgccgtctacgcggtcgcggtcaggacagcgaagaggtcattgcaaagcgtatggcgcaagctgttgcagaaatgagccattacgccgaatatgattatctgattgtgaatgatgacttcgataccgcgttgaccgatttgaagaccattattcgcgccgaacgtctgcgcatgagccgccaaaagcagcgtcatgacgctttaatcagcaaattgttggcagactgaacctgatttcagtatcatgcccagtcatttcttcacctgtggagctttttaagtatggcacgcgtaactgttcaggacgctgtagagaaaattggtaaccgttttgacctggtactggtcgccgcgcgtcgcgctcgtcagatgcaggtaggcggaaaggatccgctggtaccggaagaaaacgataaaaccactgtaatcgcgctgcgcgaaatcgaagaaggtctgatcaacaaccagatcctcgacgttcgcgaacgccaggaacagcaagagcaggaagccgctgaattacaagccgttaccgctattgctgaaggtcgtcgttaatcacaaagcgggtcgcccttgtatctgtttgaaagcctgaatcaactgattcaaacctacctgccggaagaccaaatcaagcgtctgcggcaggcgtatctcgttgcacgtgatgctcacgaggggcaaacacgtagtagcggtgaaccctatatcacgcacccggtagcggttgcctgcattctggccgagatgaaactcgactatgaaacgctgatggcggcgctgctgcatgacgtgattgaagatactcccgccacctaccaggatatggaacagctttttggtaaaagcgtcgccgagctggtagagggggtgagcaaacttgataaactcaagttccgcgataagaaagaggcgcaggccgaaaactttcgcaagatgattatggcgatggtgcaggatatccgcgtcatcctcatcaaacttgccgaccgtacccacaacatgcgcacgctgggcagtcttcgcccggacaaacgtcgccgcatcgcccgtgaaactctcgaaatttatagcccgctggcgcaccgtttaggtatccaccacattaaaaccgaactcgaagagctgggttttgaggcgctgtatcccaaccgttatcgcgtaatcaaagaagtggtgaaagccgcgcgcggcaaccgtaaagagatgatccagaagattctttctgaaatcgaagggcgtttgcaggaagcgggaataccgtgccgcgtcagtggtcgcgagaagcatctttatagcatttactgcaaaatggtgctcaaagagcagcgttttcacagcatcatggacatctacgctttccgcgtgatcgtcaatgattctgacacctgttatcgcgtgctgggccagatgcacagcctgtacaagccgcgtccgggccgcgtgaaagactatatcgccattccaaaagcgaacggctatcagtctttgcacaccagcatgatcggcccgcacggtgtgccggttgaggtccagatccgtaccgaagatatggaccagatggcggagatgggtgttgccgcgcactgggcttataaagagcacggcgaaaccagtactaccgcacaaatccgcgcccagcgctggatgcaaagcctgctggagctgcaacagagcgccggtagtagctttgaatttatcgagagcgttaaatccgatctcttcccggatgagatttacgttttcacaccggaagggcgcattgtcgagctgcctgccggtgcaacgcccgtcgacttcgcttatgcagtgcataccgatatcggtcatgcctgcgtgggcgcacgcgttgaccgccagccttacccgctgagccagccgcttaccagcggtcaaaccgttgaaatcattaccgctccgggcgctcgcccgaatgccgcttggctgaactttgtcgttagcagcaaagcgcgcgccaaaattcgtcagttgctgaaaaacctcaagcgtgatgattctgtaagcctgggccgtcgtctgctcaaccatgctttgggtggtagccgtaagctgaatgaaatcccgcaggaaaatattcagcgcgagctggatcgcatgaagctggcaacgcttgacgatctgctggcagaaatcggacttggtaacgcaatgagcgtggtggtcgcgaaaaatctgcaacatggggacgcctccattccaccggcaacccaaagccacggacatctgcccattaaaggtgccgatggcgtgctgatcacctttgcgaaatgctgccgccctattcctggcgacccgattatcgcccacgtcagccccggtaaaggtctggtgatccaccatgaatcctgccgtaatatccgtggctaccagaaagagccagagaagtttatggctgtggaatgggataaagagacggcgcaggagttcatcaccgaaatcaaggtggagatgttcaatcatcagggtgcgctggcaaacctgacggcggcaattaacaccacgactagcaatattcaaagtttgaatacggaagagaaagatggtcgcgtctacagcgcctttattcgtctgaccgctcgtgaccgtgtgcatctggcgaatatcatgcgcaaaatccgcgtgatgccagacgtgattaaagtcacccgaaaccgaaattaatgttttatgaacccaacacgttatgcacgcatctgcgaaatgctcgccaggcggcagcctgatctgaccgtctgcatggagcaggtccacaaacctcataacgtttctgcgattattcgtaccgcagatgccgttggcgtacatgaagttcacgccgtctggcctggtagccgcatgcgcaccatggctagcgcagcggcgggtagtaacagctgggtacaggtgaaaacacaccgcaccattggcgatgccgtcgctcatctcaaaggccagggcatgcagattctggcaacccatctttctgataacgctgtcgatttccgcgaaattgattacactcgcccgacctgcattttgatgggacaggagaaaacgggcatcacgcaggaagcattggccctggcggatcaggacatcatcattccgatgatcggcatggtgcagagcctgaatgtttccgttgccagtgccctcattctttacgaagcccagcgtcagcggcaaaatgcaggcatgtacctgcgtgaaaacagcatgttgccggaagcagagcaacaacgcctgttgtttgaaggcggctatccggtgctggcgaaagtcgcaaaacgcaaaggcctgccttatccccacgtcaatcagcaaggcgagatcgaagctgatgccgactggtgggctactatgcaggctgcagggtaagtgccatgaaaggtcgcctgttagatgctgtcccactcagttccctaacgggcgttggcgcagcacttagtaacaaactggcgaaaatcaacctgcataccgtgcaggatctactcttacaccttcccctgcgctacgaagatcgcacccatctctaccccatcggagaactactgccgggcgtttatgccacggtggaaggcgaagtgctgaactgcaatatctccttcggcggtcggcggatgatgacctgccagatcagcgacggttccggcatcctcaccatgcgctttttcaatttcagcgcggcaatgaaaaatagcctggcggcgggccgccgtgtactggcttatggcgaagcaaagcgcggtaaatatggtgcggagatgatccacccggaataccgcgtgcagggcgatctcagcacgccagaattacaggaaacgctcacgccggtttatccaacaacggaaggcgtaaagcaggccacgctgcgtaaattaaccgaccaggcgctggatctgctcgacacctgcgccattgaagaactcctgccgccggaactgagtcaaggaatgatgacgctaccggaagcgttgcgcactttgcaccgcccgccaccgacgctacagcttagcgatctggaaaccgggcagcatccggcgcaacgtcgtctgattctggaagaactgctggcgcacaacctcagcatgttagccttacgtgccggagcacagcgttttcatgcccagccgctgagcgccaatgacacgctgaaaaataaactcctcgccgccttaccgttcaagccaacgggcgcacaggcacgcgtagtggcggagatcgagcgcgatatggcgctggatgtgccgatgatgcgtctggtgcagggcgatgtaggttccggtaaaacgctggtcgccgccctcgccgcgttgcgtgcgattgcccacggcaaacaggtagcattgatggcaccaaccgaattactcgccgagcagcacgccaataacttccgcaactggtttgcaccgctcggtatcgaagtgggctggctcgccggtaagcagaaaggtaaagcacggctggcacagcaggaagccatcgccagcggtcaggtgcagatgattgtcggtacacacgccatcttccaggaacaggtgcagtttaacggcctggcgctggtgattatcgacgaacagcatcgttttggcgtgcatcagcgtctggcattgtgggagaaaggccagcagcagggcttccatccgcatcagttgatcatgaccgccacgccgatcccccgcacgctggcaatgactgcgtatgccgatctcgataccagcgtgatagatgagctgccgccaggccgcacgccagtgactacggtcgctattcctgatacccgccgtaccgacatcattgaccgcgtgcaccacgcctgcataactgaaggtcgtcaggcatactgggtttgtacgttgattgaagagagcgaattgctggaagcgcaggcggcggaagctacctgggaagagttgaaactggcgctaccagagttgaacgttggcctggtacacgggcggatgaaacctgccgagaaacaggcggtgatggcgagctttaaacaaggtgagctacacctgctggttgccacaaccgttattgaagtcggcgttgatgtgcctaacgccagtctgatgattatcgaaaacccggagcgtctgggtctggcgcagttacaccagctgcgcgggcgcgtaggtcgtggcgcggtggcttctcactgcgtgctgctctacaaaacgccgctttctaaaacggcgcaaattcgcctgcaagtgctgcgcgacagtaacgacggttttgtgattgcgcaaaaagatctggagattcgcggccctggcgaattgttaggcacgcgtcagacgggtaatgctgaatttaaagtggcggatttactgcgcgatcaggcgatgatcccggaagttcagcgcctggcacgccatattcacgaacgttacccacaacaggcaaaagccctgatagaacgctggatgccggagacggaacgttacagcaatgcgtaaaaggcggcagtgagaagaccgccatttcaggttaccctaccttcctgccggatgcgattcatcaccctacaaattcaataaattatgaatcaatacgcaggcttgataagcgaagcgtatcaggcatttgtctttgttgcggcggcacttctaccgccgcttcatcggttaaccggcaaaaatcggcaacatcaaatacaacttaattaccagcgcattgacgatatcgataaagaacgcaccgaccatcggcaccaccaaaaacgccatgtggcccgggccaaagcgttcagtgatcgcctgcatgttggcgattgccgttggcgttgcaccgaggccaaaaccacagtgacccgcagccagcactgccgcatcgtagtttttgcccatcatgcgccaggtaacgaagatggcatacaacgccatgaagatggtctgtaccaccagaatcgccagcatcggcagcgccaggctagccagctcccacagtttcagccccatcaacgccatcgccaggaacaagctcaagcttacgttacccagcacggataccgcacgctcaaagacgcggtaaaagcccattatactcagaccgttgctcagaatcacgccaacaaacagtacacagacgaaggtcggcagttcaaaagcagtgccagccaaaagttgcgcaacaattttccccaccgtcaggcagatagcaatcagcgcgatagtttcaatcagcaccaagctggtgatcatgcgtcccacatccggcttttcaaacgccgtcgggacttcctggtcatccggaataccgttcggcgtggtggagtgtttcaccagatagcgcgccaccggaccgccaatcaagccgcccagcaccagaccgaacgttgcacaggccatcgccacttccgtcgcattggtgaagccataacgttcaatgaacaatttactccacgcagcgcccgtaccgtgaccgccggaaagagtaatagaaccggccaacagccccatcagcggatcaagccctaacaagctagccataccaatgccaatggcattttgcatcaccaacagaccaacaaccacaatcaagaagatgccaaccacacgcccaccggcacgcaaactggcaatgttggcgttcaggccaatggtggcgaagaaagccagcattaacggatcgcgcagggacatatcaaagttgacttcccagcccatgctttttttcagtactagtagcgccagcgccaccaacaaaccacccgcaacaggttccggtatggtgtatttcttcaaaaaggagacggaatggaccaacttacgcccgagcagcaacgtcagcgttgcggcaacaagcgttgctaaagtatcgagatgaaacatagttactcctttgtatccgcatcactctttcatactcgtcatacttcatcgcgcagtggcaacttcatgaactatgacgggtatcgagttatgctttcctgggtcaaattctcagctgttaatgaacaaatggcatggattttaagcagaaaaataccaaaagttatataaaaaagtgcatttatctcatttaaatatttagatgaggatgtggcaaacgtttgcttttctctttcggtcagctaaaatgcccgctttgctaccacgggattgttttcgatgtctgtttccaccctcgagagtgaaaatgcgcaaccggttgcgcagactcaaaacagcgaactgatttaccgtcttgaagatcgtccgccgcttcctcaaaccctgtttgccgcctgtcagcatctgctggcgatgttcgttgcggtgatcacgccagcgctattaatctgccaggcgctgggtttaccggcacaagacacgcaacacattattagtatgagcctgtttgcctccggtgtggcaagcattattcaaattaaggcctggggtccggttggctccgggctgttgtctattcagggcaccagcttcaactttgttgccccgctgattatgggcggtaccgcgctgaaaaccggtggtgctgatgttcctaccatgatggcggctttgttcggcacgttgatgctggcaagttgcaccgagatggtgatctcccgcgttctgcatctggcgcgccgcattattacgccgctggtttctggcgttgtggtgatgattatcggcctgagcctaattcaggttgggttaacgtccattggcggcggttacgcagccatgagcgataacaccttcggcgcaccgaaaaatctgctgctggcaggcgtggtcttagccttaattatcctgcttaaccgtcaacgtaacccttacttacgcgtggccagtctggtaattgcgatggcggccggatatgcgctggcgtggtttatgggcatgttgccagaaagcaacgaacctatgacgcaagaactgattatggtgccaacgccgctctattacggtcttggcattgaatggagtctgctgctgccgctgatgctggtctttatgatcactagcctggaaaccattggcgatatcacggcgacctctgacgtttccgaacagccagtgtccggtccgctgtacatgaaacgcctgaaaggcggcgtgctggcaaacggcctgaacagctttgttagcgcggtgtttaacaccttcccgaactcctgcttcgggcaaaacaacggagtgatccagttgactggtgttgccagccgctatgtcggttttgtcgtcgcgctgatgttgatcgtgctgggtctgttcccggcagtgagcggttttgtacaacacattccagaaccggttctgggcggcgcaacgcttgtaatgtttggcaccatcgccgcctccggtgtgcgtatcgtttctcgtgagccgctgaaccgtcgggcgattctgattatcgcgctgagcctggcggttggtctgggcgtgtctcagcagccgctgattttgcagtttgcccctgaatggctgaaaaacctgctctcctccgggatcgccgcgggcggtattactgccatcgtgctgaatctgattttcccaccagaaaaacagtaattcactggcggcggtaagataattaccgccgcagtctcacctctttaaccattcccgccttgaggattgcgcgtaaatcgtgcataactcccttatgtgcatttcacgggatggaagaccatgaaatttattgggaagctgcttctctacattctcatcgctctgttagtggcgatcgctggcctctattttcttctgcaaacccgctggggagcagaacatatcagcgcatgggtttccgagaatagcgactatcatctggccttcggggcgatggatcaccgtttttccgcgccatctcatatcgtgctggagaacgtcacgtttggtcgtgatggccagcccgcgaccctggtggccaaaagtgtcgacattgcgctaagcagtcggcaactgaccgaaccacgccatgtcgataccatcctgctggaaaacgggacgctgaatctcaccgaccagaccgcgccgctaccgttcaaagccgatcgtctgcaactgcgtgatatggcgtttaatagcccgaatagcgaatggaaactgagcgcgcagcgggtaaatggcggcgtagttccgtggagtccaaaagccggtaaagtgctgggtacgaaggcgcagattcagtttagtgccggaagccttagcctcaatgatgttcctgccaccaatgtactgattgaaggcagtattgataacgatcgcgttacgctgactaacctgggtgccgacatcgcccgcgggacattaaccggaaacgcgcagcgtaacgccgacggcagctggcaagtggaaaacctgcgcatggcggatatacgtctacaaagcgaaaaaagcctaaccgacttctttgcgccattacgctctgtcccgagcttgcagattggtcgcctggaagtgatcgatgctcgtttgcaaggtccggactgggcggtgaccgacctcgatctcagcttgcgcaacatgaccttcagtaaagatgactggcagacacaggaaggcaaactgagcatgaacgctagcgagttcatttatggtagcctgcatttatttgacccgattataaacacggaattttccccgcagggcgtagcgctgcgccagttcaccagccgctgggaagggggtatggtcagaacgagtgggaactggctgcgtgacgggaaaacgttgatccttgatgatgcggcaattgccgggctggaatataccttgccgaaaaactggcaacagttgtggatggaaacgacacccggttggttaaacagcctgcaactgaagagatttagcgccagccgcaatctgatcattgatatcgaccctgacttcccgtggcagctcaccgcgctcgatggttacggtgccaacctgacgctggttaccgatcataaatggggcgtctggagtggcagcgcgaatctgaatgccgccgccgcgacattcaatcgtgttgatgttcgtcgcccgagcctggcgctgaccgccaacagcagcacggtgaatatcagcgaactgagtgcatttactgaaaaaggcattctggaagccaccgccagtgttagtcaaacgccacaacgtcagacacatatcagcctgaatggacgcggtgtgccggtgaatattttgcaacagtggggatggcctgaattaccgttgactggcgacggcaatattcagcttaccgccagtggcgatattcaggccaatgtcccgttgaaacctacggttagcgggcaattgcatgccgtgaacgccgcaaagcagcaagtgactcaaaccatgaatgctggcatcgtttccagcggtgaagttacaagcacggagccggtgcggtaaacatcaatctcgccgggtacgactcagacgtacccggcattccatcaatagattacaacgtaattgtcagcgcattcccttgaggcttcaccaccagcccctgctcactttcagcctggctaccgtcttgcagaccatttactttcacaacattgcgcaggcacagtgtccagttcttcgcctcgcccgcaccagtcacagtaatcgtgttgccagtacgtgctgcttttaaagtaaagatcacgcttccgtcagcagcgggcacttcacagacggcttcatgcccgtcttgcagattgaagaggtggaatgccgtgccttcgtgccacacgtaatcgggacgttgatcgttgttgcccagcgccagtagagtgttatcacgcacataaacgggcagactcaggaagccgtgctgctgtttatgccagcgactaccgtcgagttcatcgttgtgccacaggtgtgtccagcgaccttccggcaggtagaactgcacatcgcccgcttcagtgaacaccggcgcaaccatcacgttgtcgcctaacatgtattgacggtcaaggtaatcacaagccggatcgtccgggaactccatcatcatggcccgcatcatcggcgtaccccgcgcgttcgcacgcgcagcttcacgatacagatacggcatcatgcggcatttcagttgcgtgaagaagcgcaccacatcacaggactcatcatcgtaggcccacggcacacgataagatttgctaccgtgtaaacggctatggctggagagcaaaccaaacgcgcaccagcgtttgtaaacgtgcgccggagcggtattttcaaagccgccgatatcgtggctccagaagccaaaaccactaaggccaatagacaaaccaccgcgcaggctttccgccatactttcgtagttagcgtaacaatcgccaccccagtgtaccgggaatttctgcgcaccgacggaggcgctgcgggcaaacaagacagcttcttcctcaccaacggtgtccttgagcacgttccacaccagttcgttgtagatgtacgcataatggttatgcattttctgcggatcggaaccgtcaaaccactgaacatcagttgggatacgttcgccaaagtcggtcttaaagcaatcaacgcccatcgcgaccagacctttcagtttgtcggcgtaccatttgcaggcatccggattggtaaagtcataaatcgccagacctggctgccatttatcccactgccataggctaccgtccgggcgtttgagtaaatagcctttctcttgtaactctttaaagacgggggatttttgaccgatataggggttaatccagacgcagattttcagtcctttcgctttcaggcggcggatcatcccttccgggtcagggaaagtcagcgggtcccactcaaaatcgcaccactggaaggctttcatccagaaacagtcaaagtggaaaacatgcagcggcagattgcgttccgccataccatcgataaagctgtttaccgtcgcttcgtcgtagttggtggtaaaactagtggttagccacaggccgaaggaccacgcgggcggcagcgccggacgaccagtaaagcgggtataacgatcaagtaccgctttcggcgtcgggccgtcgataacaaagtattcgagatattcactctcaacgctgaactgcactttggagactttctcgcttcccacttcaaaagagacacactggggatgattgaccagtaccccataaccacggttagtcatgtagaacgggatatttttatacgcctgttcagtacttgtgccgccgtcccggttccaggtctctaccgtctggccattgcgcaccagggcagtaaagcgctctcccagaccgtaaactgtttcgccaacgccaagatcaagccgctcaaacatataattgcgttgattattcgtgtcctgcacgtagccattatttttcacctgactaccggtaatacgttcgccgttgcgcagaaaatccagactccagaactcacctttgctgacacgcgcgcttaagttgccacttttaaactcagcataacgttctgtgttttcgattgtgaccttcacgtcctgcaaaatattgagcggataatgaggaccgttattcagcgccccctgaaaatgctcaatccgcacaccgacaataccttcctgtggggagaaaaagcgcaacgtaaataaaggcgtatcaagctgccaggtacgttcacgcacatcacggggggcagcatagaccaccatttcattatcctgctgttcaacctcgaacacctgaagcgggtgaatcaaattgaggccaggttgaatcaaccagtttccatcgctaattttcattgccgttccttagttctgcacttcttgagaggtgaattgttgctggcaacggcgtttaccctgagccagctgttccataacggttttcagattgtgcgtcgtgagactgtagtagcgtttagcgataatcgcgctcagcaaataacagatcgccggaacaatcgtgaatagcgcaataatgatgctaatcgtggcgctgttctgcgctttttctgccgcatcatatccgccataagccagcatccagccgataagagcgccgccgaaggccaaccccagtttgagcacaaacagcgtgccagcaaaactgatcccggtcaggcgtttaccattgcaccactcgccgtagtcgacggtatcggacatcattacccactggataggtgtcaccagttgatgcaacacaccaatcacgaagatgaagacaaacatagtgatgctggcctgcatgggaacaaagaacatcgcgaggctaatcactgccagcagggcgttcgtccaccagaagatagtgactttacatttccagtcggtcagaggttttgccagtgcggaaccaatcaggttacccacgcaataagtggtgagaaaagcgacaaacacttccggcgtgcccaaaatccatgtgacgtaatacatcatcgccccaccgcgtacgcacaccgccaggatattgaaaatggttagtaaaccgacaatccgccactggtcgttttgccagatatcacgtaaatcttcccgcatagacgttgttgtaggtggtgcttcaacgcgttctttagtggtgaagaaacaaaatgccagcatcatgaatgccaccacggaaaggaccgcgataccgccctggaaaccgagtggtttattatcaccgccaattaaattaaccagtggcatcatcagaacagtagaaagcatgcctcccgcggtcgccagcacaaaacgccaggattgcaggctgatacgctgagtcgggtcattggtgattacaccacccaatgcgcagtaagggatattgacgacggtataaagtaaggtaagtagggtgtaagtaattgctgcatagatcattttgccgttcatactgagatctggcgtgctataggccagtacacagacgatcccgaatggcagtgcgccaaacagtacccacggacgaaatttaccccagcgagagcgcgttcgatcggccaacaaccccatgcaaggatcggaaatcgcatccagtgcacgagcgaccaaaaacatggttccgacaaaaccggcaggaatgccaaaaatatcggtataaaagaacatcatatataacattacgttatcgaaaataatgtggctggcggcgtctcccatgccataaccaattttctctttaacggacaacacttcactcttcatctgcttttccttgatgctataggggtgctgagaccgataacgcattttgtaaaccatccctgtgagagcgaatattccgatatctggttattaatttatgattcttgttttatgtgatcgtggtagcgttaattccgctcatatatcattgtaaaatatgggttttatatgaactataatgctttcgtgataatacgctgcgtgtattaggcggaaaaaactgatctgggggatgtagaaactcaaggaagtagctataatgcgccccgcctccatgtagcaatcgaggcgcggaagatcgtcgtctccggtgaggcggctggacttcaaatccagttggggccgccagcggtcccgggcaggttcgactcctgtgatcttccgccaaaatgcctctcctgacgttctccaaccccttgtaatactgtcaatccagatattttctactgctcaatattcaatcggcttcaggaatacctggtctaaggttttgtgatggacgatgagcggctgaagaatccgcctgtcggttcttctgtcctcgaacgcatccgcgatattcacgccagtatgcgccgtgtttatttgcaggtgatttgcccccctgctgactctcagccaactgtatcgccattaaggtgaagatgttgttttactcgccccagaacacccttttttatacgactattctatttctttaaccgctggcgaaaaaaactgactataaacttcaccaataatcagactgccatcaagattaatttgttcatttaatatatcaaatcaacttgttttatttttactatcaaaaatagctcattgccttactataattaatatataaattcggtaattaattcttaacatgcttttactaataatctcaattgctggccctataatattgcgctagcattgctttctggttgtatcagcgatactcaaaaattcttaatacaatactcattcgactggtacttatttgtaactcagttatattttttcgcccggtgattcagaagaatgcaaaaaacggctaccactccaagtaaaatacttgatctcactgccgcggcatttttacttgtcgcctttctgacgggtattgcgggcgctcttcagactcctaccctaagtatattcctcgcagatgaactgaaagcccgtcctataatggtaggttttttcttcaccggtagcgctattatgggaattctggtcagtcaatttctggcaaggcactccgataaacaaggcgaccgtaaattactgattctgctatgttgcttatttggagtgctggcctgcacgctttttgcgtggaatcgcaactacttcattctcctcagtacgggcgtacttctgagtagttttgcttccaccgcaaacccgcaaatgttcgccctcgcccgtgaacacgccgacagaacaggccgtgagacggtcatgttcagtacatttttacgtgctcagatcagccttgcctgggttatcgggccaccgctcgcttatgaactggcaatgggatttagttttaaagtgatgtatctcaccgctgccatcgcatttgttgtttgcggactgatagtctggttgtttttgccaagtatacaaagaaatattcctgtcgttacccaacccgtagaaattttaccctccacccacaggaagcgggatacgcggctactttttgtggtctgtagtatgatgtgggcggcgaataatctctacatgataaatatgccgctatttattattgatgaactgcatctaaccgataaactgactggagaaatgattggtatcgctgccggtctggaaattccgatgatgttaatcgcaggctattacatgaaacgtattggcaagcgactattaatgctcattgctatcgtgagtggaatgtgtttttacgccagcgtactcatggcgacgactccggcggttgagctggaattgcaaattcttaatgccatcttccttggtattctctgtggtatcggcatgctttattttcaggacttgatgcctgaaaaaataggctctgcgacaacgttatatgcaaatactagtcgcgtcggctggattatcgccggctctgttgacggaattatggttgaaatctggagctaccatgcgttgttctggctggcgatagggatgttgggtattgcgatgatttgcctgctgtttattaaagatatttaactcaccagtctgggctaagaaaaatcggcgtggcgcaaacagagccatcctcgccatttttgctatcatgcctgcatacataaacgacaaaacagtatgcagagggaaaaatgggttccaccagaaaggggatgctgaacgttctgattgccgccgtgttgtggggaagtagtggggtctgcgcgcaatacatcatggagcaaagccagatgagcagccagtttttgactatgacgcgtttgatattcgccggtttgattctactgacgctgagttttgttcatggcgataaaatcttttctattattaacaatcataaagatgccattagcctgctgattttttccgtggttggcgcgctaactgtacagctcacttttttgctaaccatcgaaaaaagcaacgcagccacggcaacggtgctgcaattcctcagtccgacgattatcgtcgcctggttcagtctggtgcgtaaaagccgcccgggcattctggttttctgcgctattttgacaagcctggtcgggacttttttattggtgacacacggtaatccgacgagtttaagcatctctcctgccgcgttgttctggggcattgccagcgcatttgctgctgcattctataccacctatcccagtacgctaattgcccgctatggcacgttaccagtcgtcggctggagtatgctgattggcggtctgattctgttgcctttttatgccagacaaggaacaaactttgtcgttaacggcagtttgattctggcgtttttttatttggtggtcattggtacgtccctgacatttagtctgtacctgaaaggagcacaattaattggcggtccaaaagccagcattttgagctgtgcagaaccattaagtagcgcgctactctctttgctgttgctggggatcacgttcacattaccggactggctgggaacgctgctgattctgagtagcgtgattttgattagtatggattcccgtcgccgcgccagaaaaataaatcgtccggcgcggcataagtgagaattaccagccaggcaccgcgccaccgttaaaaatggtttctgccgctttagcgacttcgggactttgataagattgcagaaattccttcacgttttctgcattcttattatcttcccgtgccaccaaaatattcacatacgggctattcttatcttcaataaatacgctgtcgtgcaccggagaaagcccggtctgctgaatgtaagtggtgctgataatcgctacatcaactttgggatcatccagtacgcgcgggagctgcgccccctcgagttccataatctgcaaatgacgaggattatcggttatatccagcgcggtaggtaataacccttttccctctttcagagtaattagcttctctttttgcaacagtaaaagtgcgcgaccaaggttggtcgggtcgttggggatcgccactgtcgcgccttcttttatttgcgccacggttttgatttttttggaataacccgccatagggaagacaaacgtatttcccaccgctaccagtttataaccatgcgcctgattatcttgttcaagaaagggtcgatgctggaagacattcgcatcaagttcgccatgatttgtcgcatcgttcggtagcaagctaccgctaaatcctaccagttcaacatcgaggccatatttctcttttgccacctttttagcgacttccgcgacatcttgttctgcgccatttataacgccaactttaatgtgttttgcatcgctgctactctggtcgcaacctgccagcagaattccggccagcaataatgcggcccctgtccgtagatgatgtgttgtcagtttcatttttttatccttttattaatgattacctgactatagcggtaaggtcgctgcggtttaaaaaacgaaacgctatcgataagaataaaaaggaataaaagtggaatataaagtctggcacttcttactgaccacgcaagcgcgtttcgtacagcatgatgagagcgatgaaagcaaactacacttatgcttcattcgatacacatttgtaaaaggttgaatccatgaaaccaacgacactactgcttattttcacttttttcgctatgccaggcatcgtatacgccgagagcccttttagcagtctgcagtccgcaaaagagaaaaccacggtattacaagatttacgtaaaatttgcacgccacaggcgagtttaagtgatgaagcgtgggaaaagttaatgttgagtgatgaaaacaataaacaacatatacgcgaggccatcgtggcgatggaacgtaataatcagagcaattattgggaagcgttgggtaaggtagaatgcccggatatgtaagaacagcaacaactactgaccaacgcttctttacctgatatcaggatttcttcattttcacctttgcagtaaccaacaatgcagtcagcaacatcaatgtgccggacaacatcaacgggctagtcagaccaatattatccagcgcataaccgccgattgccgcgccacaggtattagcaagctgaataaccgccacctgaatagacccggctttttctgcctgatcggccaggctgcgggtgatccacgtactccagccgacgggaaccaatgcaaaagttagcccccagataatcgccacgccggtagcaacgattttatcgcttccccacaacgtcagtaccaacgcactcacagccagtattaacggcgcgcctgctaaggccagttttacgctacgtttaagaatgaagctgctaaggctcgtaccaataaagctggcgataccaaaactcaacagcaccagcgttaagccatccacgccgaatcccgccaggttcatatacaccgggcgaatatacgtgaagaaagcaaactgcccggcgaaagacatgaagatggcgatcatccctgccatcacacccggacgttgtaataagcggaaagtattttgtttctgatggctgggttcgcctggcagactaggcaaacttttgataatccagaaaatacacagcacgcccatcaccgccgccgcattaaagacattgcgccaaccgataagctcgcctaaaaaactgcccaacggcgcggcaatcaccagcgcaatagaaaccgcgccgaagatcacgctcagcgccttcggcaccgtacgcggcggcaccagacgcatggtcaggctcgcgctcatcgcccagaacccgcccagcgccagccccagacaggcacgaccgattaaaagcaaactgaaactgttagcaaaggaaaccagcaagcaggagagcgtcagcaaaacggcaaacaaaataacaacgtagcggcggtcagtagcctgaattgtctgggtaataaacaaactggcaaacattgccacaaaggcggtcacggtcacgctttgcccggcaaccccttcgctaatgcctaaatcctgggccattggcgtcaacaaactgacgggcaaaaactcaacgataatcagacaggcgacacaaaacgccacgctgaaaacggcactccagttcggtcgggtgatggcatccgcgccgcggttttcggcaataaattcactcatggtgttacccgtggcatgtttcaggggaaaagcgctccactttaacatactaatgtgactcgcatttaacgtttttgcaacttttacggtgttgctactgctggagttaagatcgaaacggaacagggcaaagattaccggatgcggcgtgaacgtcttatccacccgacaggtcaggcgcggtctgtaggctgataagacgaaacggtttcaatgcaaccagtgaacgccctcggcaggctgaaagaacgcgttatagcgcatctgaaaagcattaatatcctgcatttcaggttcggtttcgcgcagaaaacctagcgccagcctgacctgagcgtcggtaatcggcgcggcgaggcgagctttttgtaaaatccgatgccattgcagcaggttctgttcgctaccatcgacaatgacaatttgccagatgagcaacacctgcgcggcgttttgcaggtggctctcatccggacgatgcaaataacgtaaaaattcgtcaccagcactctttcccatttgatcgaccatgctctccacgggtacgacatcgatgttcagccgatcgctgagacggcgaatcgcttttctggccccggatgtcagcacccgaaaaccaaccacaaacactaccgccagcgtggcgagcattatccagatcatgagttctcctgcgtaatcagaactcatgatatctggaaaccctcgccagttattaatccaccagaataatcttcagtgcaaacagagctgcgaccaccaccacacacaggttcagatcgcgccagcgcccggtgcatactttcatgatgcagtagctcataaagccgagtgcaatcccttcggtgatgctgaaagtaaagggcatcatcaccgtggtaataaacgcaggcacgctttcggtaaaatcatcccagttaacgcgcgccaggctgctagtcatcagcacgccaacaaagattaacgctccggcggttgcgtaaggaggaactatcgccaccagcggactgaagaacataaccaacaggaacataacgccaaccacaaccgcagtcagccccgtgcggccaccgactgccacaccagaagtactttcaatataggcagtaacagagctggtgccgataaacgcacccgccacgctactgacgctatcaacatacagcgccttattcatattggggaatttaccgttaccatctattaagcccgctttatcagttacaccaattaatgttccactactatcaaataggttgatcagcataaaggagaaaatgataccggcgagttcaagtgttaacgcgccgctcaaatctacttcaccaatgacgccgctaatatcaggcggaatggaatagacgccgctaaaatgaacatcaccgaaaaataatccacagcaagacgtcaccacaatagaaaccagcaccgcggcatgaaaatgacgactactcaacacggttataataaaaaaccctaaaatacctaacaacacgccgtgagaacttaaatcgccaatcatcaccagcgtgtctttattggcgacaataacgccagtattttttaatcccattaaggcgataaataatccaattccgctggtgataccaatacgtaaacttaagggaatgttggagatcatccagtaccggatacgaaacagcgtgagcaaaaatagtccaactgcgccccagaatattgcgcccatcccggtctgccaggagatgcccatcgcccccacgaccacgaaggcaaagaaggcgttcagccccattgccggagccagcgccacgggtaagttagcaaatatccccatcgcaatactgccgataccggcaatcaaacaggtggtaacaaacaccactttcgggtccatttgtgccgcgccgaggatttgcgggttcacaaaaacgatgtacaccatggttaaaaaagtggtcatccccgcaatcaattctgtgcggacggtggtcccatgctgaggtagtttaaataatcggctaagcgtcccactttcattactcacgtaatcggtattgtcattattcatttttttgtccattggaggagatttaatcccttgcttttgtaaaacaaatgacaacaacggttcagtgataattatcacatttcaattgcacattaatggatattctttaataatctcgcgacgtttctttatgataaataataatcaaattgataaaatcaaaatgagaaaaatatgaataattctattaaccataaatttcatcacattagccgggctgaataccaggaattgttagccgtttcccgtggcgacgctgttgccgattatattattgataatgtctctattctcgacctgatcaatggcggagaaatttccggcccaattgtgattaaaggacgttacattgccggtgttggcgcagaatacactgatgctccggctttgcagcggattgatgctcgcggcgcaacggcggtgccagggtttattgatgctcacctgcatattgaatccagcatgatgacgccggtcacttttgaaaccgctaccctgccgcgcggcctgacgaccgttatttgcgaccctcatgaaatcgtcaacgtgatgggcgaagccggattcgcctggtttgcccgctgtgccgaacaggcaaggcaaaaccagtacttacaggtcagctcttgcgtacccgccctggaaggctgcgatgttaacggtgccagttttacccttgaacagatgctcgcctggcgggaccatccgcaggttaccggccttgcagaaatgatggactaccctggcgtaattagcgggcagaatgcgctgctcgataaactggatgcatttcgccacctgacgctggacggtcactgcccgggtttgggtggtaaagaacttaacgcctatattactgcgggtattgaaaactgccacgaaagttatcagctggaagaaggacgccggaaattacaactcggcatgagcttgatgatccgcgaagggtccgctgcccgcaatctcaacgcgctggcaccgttgatcaacgaatttaacagcccgcaatgcatgctctgtaccgatgaccgtaacccgtgggagatcgcccatgaaggacacatcgatgccttaattcgccgcctgatcgaacaacacaatgtgccgctgcatgtggcatatcgcgtcgccagctggagcacggcgcgccactttggtctgaatcacctcggcttactggcacccggcaagcaggccgatatcgtcctgttgagcgatgcgcgtaaggtcacggtgcagcaggtactggtgaaaggcgagccgattgatgcgcaaaccttacaggcggaagagagcgcgagactggcacaatccgctccgccatatggcaacaccattgcccgccagccagtttccgccagcgactttgccctgcaatttacgcccggaaaacgctatcgggtcattgacgtcatccataacgaattgattacgcactcccactccagcgtctacagcgaaaatggttttgatcgcgatgatgtgagctttattgccgtacttgagcgttacgggcaacggctggctccggcttgtggtttgcttggcggctttggactgaatgaaggtgcgctggctgcgacggtcagccatgacagccataatattgtggtgatcggtcgcagtgccgaagagatggcgctggcggtcaatcaggtgattcaggatggcggcgggctgtgcgtggtacgtaacggccaggtacaaagtcatctgccgttacccattgccgggctgatgagcaccgacacggcgcagagcctggcggaacaaattgacgccttgaaagccgccgcccgtgaatgcggtccgttacccgatgagccgtttattcagatggcgtttctttctctgccagtgatccccgcgctaaaactaaccagtcaggggctatttgatggcgagaagtttgccttcactacgctggaagtcacggaataataaaaaaagcccggcgtcatgccgggcaaaagtcaccagttacgtttatgccactgtcaactgctgaatttttttctcgcggcggattttgcgttcttccattaccgccactatcgccatcaggcagatacaaccaatcgcggcgatatccagcgcggcgaaggtgcctgcccagccggtaaggccgaataccggcgtcccatcggcaatcattcccagacctaacttggcaaagctgtcaccaatcaggtaagcaaaggtgcctttaataccatcggcagcgccaatcgcttttttaggtacaaagccaacagcagccacaccaatcaacaattgcgggccaaagaccaggaaacccaacgcaaagagagaagccagatagatatattcgttactggcatgttgatacacaccgagcgtggcgataatcagcgccagcgcgatgcaggccaccaggccacggcgaccgttcgccaggtcagagagccagccccacagcagcgtaccgaccagcgcaccagcttcaaacagcgtaaagccctgaatcgccaccgctttagagagtttcagttcctggaacgcgtatacggtactccactggtcgataccaatacgtaccacatagaggaaaatgttggcgaagcacagcagccagatcactttgtttttcagcacatactcaacaaagatctgccacttggtcatatcggtagattctgtctctttgtcctcttcgctgatctcctcgccgaacagttcttcagctttgccgaggccataagattccggggagtcgctgccgtaacgcaggccgataaaaccgacaatcagcgcgataatgctcgggaagataaacatgccgatgacatggccatcgaacaggtaatttgccccgaacagcgccacacctgctgcgcctgcaccgccaaggttgtgagaaatattccagaaaccgaggaatgtcccgcgtttacgacgcggcgtccatttggtgatggtggagtaactgcagctaccgccggtactctggaaaaagccgcttaaggcgtagaaggcaatcatcaggaacaggctaacgctgccgctgcccatactggcactgaagcccagcatacaaatagcagagaggatcagcatgaacggcaggaattgtttggtgtttttgccgtcggcgtagtaggaaaccagcgttttacccacgccataagtgatggagaaacccaggccgatcatccccagctgcgtcatgctcaacccgtaggtgctaatcatatcgttctgcgcgatgttaaagttcttgcgaatcaggtacatcgtcaggtagccgataaagaccaccaggtaggattgcatgaacggtttgaaccacattttgcgccgcacttcgagcggaaggtccagggtcggcttgcgaacctggtttaagaaagccagcatgggttactcctgaaatgaatacctgcgtgaggcatgcattgtaaaaatcagcagcaaatcaggcctgagatagcgtccaggcaaaacctggaaaatttcttagttttgccggatatgaagtgaaaaggtgagatgcatcacgcttcgcgcggtgtctgggcgttcaaaaagggcagtaacagcagtgcggaaatcccggcggcgatagagataaccacaaaaaatccgctccagtgccaggtatcgagtactttcgccagcggccaaccagcaaggctcgcccccagataagcaaacaagccgacaaaccccgtcgccgcccctgccgcctctttgtgggaacactctgccgccgccataccgattaacatctgtgggccaaagacaaaaaaaccaatggtgaagaagcaggttgcctgcatcacgtagctggcaaatggcatcagccacagggagccgacactaagcaaaattccggcggcgaaaatcaaattcatcggccctcggttgccgttaaacaatttgtcgctgccccaaccggctaccagcgcaccgataaatccgcccagttcaaacatcgtcactgccgtattcgccgtgaccagatcgacgcccagtgtctcggacatatacaaattgccccagtcgttgatcgccgcccggaccacatagaccagcacatagcaaaagctaagcagccagatatacggattcagcaacacatatttggtgaggatctctttacgcgtcaaccctgccccttcttgttgttgagcaatttccagcgcgtcgtgtcgccattcaccgaccgccggtaaacctaacgcctgcgggcgatcgcgtagccgccagcagagaaaaatccccacgactatcgccatacaaccagcaatcatcatcccggcacgccagccgtaatgcagcgcagccgctgccatcacaatgggaatgagtgcgccgccgacgttatgcgccgtgttccataatgcccaccaaccgccgcgctcggtacgactataccaggccgttaacagacgcgcacacaccggactaccccagccctggaaaaaggcgttcagcacccagagcacggcaaacgcccataggctcgtgctgaagccaaacagaatgttgataatgcccgtggcgataagccctatccccataaaataacgggcattactgcgatcgctgacaatgccggagacaaacttgctcacgccataggtaatgtaaaacagggtcgctaacaggccgatatcgctacggctgagcacgccgttagcaaggatttctggtacggcggcgttaaaacttttccgcgtgaagtaaaacagcgcgtaacccagccagatggtcagcagaatatgccgacgccagtagcgatagcgggcatcaatttcatatttatcagtcattaatggcgcatcggcaggcgctttcagaaacggcaacatcatcaaaccttagacatagcgttgaggtagagaaacgctgacacgcgtgccgtgcagacaggaaatgtgtaatgtgccacccagcgccgttacgcgctcgcgcattccggtgaggccaaaaccttgttgcccggaacccggcggcaaaccgctgccatcgtcttcaataaccagcatcaaccgttcatcctgctgccagccttgcagggtgaccgcgctggcatcagcatgtttcacaatgttgttcagcccttcctggcagacacgaaacagcgtcacgcgctggttttcgcttaacgcactttcatcgattcgccattcgagatggctgacaataccgcgcccttccagctccatttcccgcatcagactgcggatggcctgctccagggtgagatcatccaactggcgcggacgtaaccgacccaacaaacggcgcaccgcgtcgtaaacgcccaggcttagttgttcgatgagctgcccgctctgcttcacgctggcgttatctgccgccagccgctgaacaatgcccgcctgagtacgaatagcagtgatggtctgaccgatatcatcatgcagctcacgcgccacatcacggcgcacgctctcttcggtttccagcaaccgttcagccagatgctgattgcgcgccagttccttttgcaggctctggttaagttcacgcaaccgctggatgccagcgccaagcaacaaccctgtcagactttgcaccagcaggctgagcaataaatccaccggatgatcgcgccaggtttgactggcgatcagcgcgatggcgttcatcaacgtcgcaatcagcgccccttgccaaccatagtgccaggccagcgcgataatcggcagcgccagacagaatggcgtaaagcggctcagttcgtccggcaatcccaactggagccagagactgataacaaacagcagcaagtaccagaccagatgtcgcccgcgccagttgattggctgagaaaccagactcggaccgagcggcagccaggtgttattggcgagatagtgccagaacaccagacatatcggggccagcgtcaggccgccagttaaagtcagcaacagcgcattccagctctctttgccgtgccaaagccagggcaggctctgcaacaacgccgccgccgttaacgccgccccctgtaacagcaaggtgcgccagtcacgctgatggcgatagcggctgatcagcgctacgggcagtaacgtcagtaaactaccgatcatcaataacggaaaatgggttaaaccgaccgcctgcgttagccagtaaatcagcagccactccgcgcccagcaatacgggccagtatccgcgcgggcattgcagcattagccccagacgcagaccaaacggaaataacagcaccgccatatcagggcgctcaaccagatgcaggctgatactccacaggcaaaaccatgcggcagagaagataaaaaagcaggcaataacggtaattaagcgggagaacaacgtcttcatcaccagccatcaaacatgcggcgcgccagctctacgtcgttactgacgcccagtttttccatcagattggcgcgatggacgtgtaccgttttcggactcaagcccagttcggcggcaatctctttcaccgccattccttgcgccagtttttccgccacctggcgttcacgtttggttagcgggtcctgacgaccggatgccagtttaatggcaatatccggcgtcagataacagccgcccgtggcaaccgtatgcaccgcagcaatgagttcatccgggctacagcgtttggaaagaaagccgcgtgcccccgcgttaagcgcctgctcaaccagcgcaggactgtcgtgaacggagagcataatcgtcgccatacctttcggcagctggcttagcagctccagaccggagatatcgggcatggagatatcgcaaatacacacctgcacaccgcgccccggcagccccgccagcgcctcgcgcccgctaccaaactcggcaactacctgcaaatcaggttccagccccagcagctgcgcaaagccggagcggacgatgaggtgatcgtctataagggcaacggtgatcatggtcttgtcctggcgggtaaaaaaaatacgcgcttaccttaacgataagcgcgatgttgttcaagccttgagcggttactgaaaaaacaccgcgatcttgttaaacatcgtcggatcggactgattacgctgcactttcacgacatcttccagcttatcgatttggcttatcatctgctccagacgctggtcgtcattgaccagtagccagatatggcttttgtcgctgtcctgaatcggcagacaaagaatgccttcaacgttaaaagcgcggcgggcaaaaaggccacaaacgtgggtcattacgcccggatggttgcgaacggtgagctccagaattacgttgtcatgagttgtgttttgcatggcttattcccccaccatttcagtattcgccgcacctggcggcaccatcgggtaaactttttcttcggcatcaatgcgcacatggatcagcgccgggccagggcgattgatgatttcctgcaaactagcctgcggatcggcttcgttattcaaatcacaggtttcgaggccgaatccggcggcaatctgcataaagttgattttgcccggataggtggcggcaaaaacgccttgctcgtagaacagactctgttgctgatgcaccagccccagcgcttcgttgttcatcagaatgattttgacatccagctgattttcactggcggtcgccatctcctgaatattcatcatcaggctgccgtcgccggagaaacacaacactttgcgatccgggttcgccagcgcagcgccaatcgccgcaggcaggccaaaacccatcgtgcccagcccaccggaggtcagccactggcgtgggcgattgagcggataagcttgcgcggtccacatctgatgctgaccaacgtcggtggtgataattgcattgtcatcgacacaggcggcaacggcgttgatcaggccgtaatggcttaacggatcgcacgctttcgggattggacacggaaactcacgctgcaaatccgctaccaactggtgccactctgcacgcggttgcgcttccaccagcgggatcaactgcgccagcacgtcatcaacatccgcctgaatcgccacgtgcggctgcttgattttacccagctctgcacggtcgatatcgacatgaatgattttggcattcggacagaactgctcggttttgccaatcgcccggtcatcaaaacgcgcaccgagcactatcaacaaatccgcctcctgcaaaatatagttggtgctgcgcacgccgtgcatccccagcatacccaggctcaacggatgcgcttttggcaacatgcccagcgccattaaagtcatggtggtaggcagttgcgctttctccgccagttcacgcacccgtgcgggcgcattgatcacaccgccgcccagataaagcaccgggcgtttggcagcgttaatcatcgccgctgcgtcacgaatgctttcttcgctaaaggcgggggcggcggctttttctgccatagcgggctgtgtttcaatctcaaaaactgccgtttgcacatccttaggaatgtctatccacaccgggcctgggcggccactttgcgcaatgcggaaggcatcgctcatgacctgcgggagttcttcgatatgtctgaccagatagttgtgtttggtgatggggatagagatgccgtaggtgtccacttcctggaaggcgtcggtgccgatcatgctggcgggaacctgaccagtgatgcaaatcagcgggatggagtccagccgcgcatcggcaatggcggtcaccaggttagtcgcacccggtccgctacaggccatacagaccgccggtttaccgtcggtgcgcgccattccctgagcgataaagcccgcgccctgttcatgacgggccagaatatggcggatttgcgtgctttggcttaaggcatcgtaaacaggcaggatagaaccgcccggaatgcctgtcacaatcttaatgccctgctgttccaggaaatgaacgataaattctgcgccggtaaagcgcttacgcgtgcttgttgtgccgctacttgccatgctccagtccttttcttctgggccgactttccgggaggtgcttaaacgaaaaaccccgcccggtttgcgccggcggggttttggaatcgtgtgttgttccagtccttacggcgcattgccgacgaccaccaccacacgcacgacgaccactgcggcggatggcgcagttggtagtagttttgcgttgagcatggaagtagtcattggggaccttgttggttttgtgtttaacaatatttatacaagcacagctttacaggggagacaatggaaaatttttcagcaagggaaaattgaggggttgatcacgttttgtactgaattgcagataacaaaaaaccccgccggagcgaggtttcgtcagtcgcctgcggctggtaaccgcaaagcacactgtattatgtcaacactgaaagtatacgtgttccgcgcagaacgcgcaatttcggcacgaattttgacgtatttagtgcatagttgagtatcgatcacagtttgcgttttgtccaaatattactgtttatttatacagtaaacttctataatatcactgtacgcaatgtgttatgcgggggccgcatcgttacccggcgcactaagttctggctgaaacgggtggtgccgtcagcgccttaaccccgcgtgagcacactgtgttatgtcaacaagcacaacgtttctccttgagataccgcgtgcacaacagctggcaacaggcagcggaaaggtacgtcagctggcagtgctcctgaaccacaggagacgcgtatgaacctggtggatatcgccattcttatcctcaaactcattgttgcagcactgcaactgcttgatgctgttctgaaatacctgaagtaattcagattcaagtcgcaccaaaggggagcgggaaaccgctccccttttatatttagcgtgcgggttggtgtcggatgcgatgctgacgcatcttatccgccctaccatctctcccggcaacatttattgccgcttttgtttacatattctgccgctaaacaattccccattcctggcgtatatctggctaacattcatcaatgtgatagattcctctcccgcatttatgggaatgcgtagtgacttattctaattatttttataaaagcatccgtgataatgaaaaggcaaagaaacgtcaatttgttattgatgttggtattactcgtggccgtcggtcagatggcgcaaaccatttatattccagctattgccgatatggcgcgcgatctcaacgtccgtgaaggggcggtgcagagcgtaatgggcgcttatctgctgacttacggtgtcagtcagctgttttatggcccgatttccgaccgcgtgggccgccgaccggtgatcctcgtcggaatgtccatttttatgctggcaacgctggtcgcggtcacgacctccagtttgacggtgttgattgccgccagcgcgatgcaggggatgggcaccggcgttggcggcgtaatggcgcgtactttaccgcgagatttatatgaacggacacagttgcgccatgctaacagcctgttaaacatggggattctcgtcagtccgttgctcgcaccgctaatcggcggtctgctggatacgatgtggaactggcgcgcctgttatctctttttgttggttctttgtgctggtgtgaccttcagtatggcccgctggatgccggaaacgcgtccggtcgatgcaccgcgcacgcgcctgcttaccagttataaaacgcttttcggtaacagcggttttaactgttatttgctgatgctgattggcggtctggccgggattgccgcctttgaagcctgctccggcgtgctgatgggcgcggtgttagggctgagcagtatgacggtcagtattttgtttattctgccgattccggcagcgttttttggcgcatggtttgccggacgtcccaataaacgcttctccacgttaatgtggcagagcgttatctgctgcctgctggctggcttgctgatgtggatccccgactggtttggcgtgatgaatgtctggacgctgctcgttcccgccgcgctgttctttttcggtgccgggatgctgtttccgctggcgaccagcggcgcgatggagccgttccccttcctggcgggcacggctggcgcgctggtcggcggtctgcaaaacattggttccggcgtgctggcgagcctctctgcgatgttgccgcaaaccggtcagggcagcctggggttgttgatgaccttaatgggattgttgatcgtgctgtgctggctgccgctggcgacgcggatgagccatcaggggcagcccgtttaagcgcacgtcaccgcagcatcgtcatcagctccatgggagaacgatgctgctttatcagatcacgcatcacccgcatatgcggtgcggagtaagaataaaacgcctgatagcccgcacaaagcacgctgtctggcgtctcctgccgagcgtgcgggcacaggcgatgccagtcgcacgcctggcagtcacagcgcggttgcgggttttcgctgccacaccatttttgtaaggtggcgtcaaaaagctcaatgctgatacgactgatatctgcccgcacccaacactcgaacagggcaattaaaaatttcccccacagctctgctgtcacgctagcggccgtcagatcgccccggtcatcaaattcaagatagggaatgagctgtacggagcggatgccccgctgtttgaaattgtgataaaaatcggcaggttgcagagcatccttgtactctacaaccagtttatgcctgtcctcttcagcatcaatgacctgacttcctgtcatgcgactctctcaataaatacgataagttgatgtatatgcgttacagcaaacagtattgcgagagataacaccgcgagggagatcaaaaatttgtcacggactacgtgaaattgggaaaaatcgctattcgtgacatccattaaattgcgattacgggtgtagtgccagaggatcagcgccacgatggcgagaatgccaatgctaatccagaataacatgcccgcctggtgccagttgtgtttgatagccaacgccatcaacgcgccgtagcccagcatggtacgaaaccacgccagacttgtgcgctccggctgcagtcctgggtcggcaatgcgtctggctttgcggctatccggcatacaacaccagtcccataacgttaattatccggcatacaacaccagtcccataacgatcaccgccacgaccatcaatattaagctaatgattaataagctgttggtgtagggcaggtcctctttcagacgcatcgctttttcattgcgtaaccagcgcaagtagccatacatcgctaacccgccggaaaacagacacaacaacaacgccagcagttcgcgaatgacgggcgtggcgaaatctggcgcaagttgatcaagcccaacccccgccgccagaaatcctagtgcagtacggatccacgccagaaaagtacgctcattagccaggctgaagcggtaatcaggcgcttctccgaggcgggaaattttcattgttgctcctttgcaatttcactaacgctctacctttagcggtttttttaagaatttcgtccgcccgtttcctgatatgcttttgccatccgctacaaggaggtcagatgggtatcatagctcaaaataaaatcagtagtttgggcatgctgttcggtgccatcgctttaatgatggggattatccactttagtttcggccctttctccgcaccaccgccaacgtttgaaagcatcgtggcggacaaaacggctgaaattaaaagaggtcttctcgccggaataaaaggcgaaaaaattaccaccgtggagaaaaaagaggacgtagatgtcgataaaatcctcaatcaaagcggtatcgcactggccattgctgcgctactttgcgcatttattggcggtatgcgtaaggaaaatcgctggggcattcgcggcgcgctggtttttggcggcgggacgctggctttccataccttgctttttggtatcggcatcgtgtgcagcattttgctgatattccttatcttttccttcctgaccggcggtagtctggtttaagcagcctgaataatgcccgccgggtgatcatcagcgggcattatcgtcagaacttctgttttttctcctccaccttcaccccttgtgtcggtaggccggtgtcatagtcgcgtacaactgggctatagccatcttgtggacgtggacgaaacgcccccatccagcgcggccgtgcatctttacgccacggacgcagactccattggtaactgcggaacggatcgcgaattttgtccatgtaatccaataaggcgtcatgcattttgctgcgaacgtctgcaaaacggatatcatcgatcaggttatgcatttcatttgggtcattacggcgatcgtaaagttcatcactggtgaagaggttgagtaccagtttaaagtcatccgtcacccagcaacgcaccggaataaaaccgccaaagctgtcatgctcaatctcgtagcggttaaattccaccatcacgccgcgtggctctttcacggcaaggatattttcccccggcagaatctctggtttttcaatatctgccagcgccatcattgtcggcagtaaatcgatatgactgactggcgtatcgacctgtcgccgctccccttgcgggctacggatgatcagcggaatgcgggtgatgtcgtcatacatcgccgcccctttactgatcagcttatgtgcgcccatcatttcgccgtgatcggaggtataaataacccacgtattttcacgttgctctggcgttaaggcattgatgacccgtccgatttggtcatcaacaaagtcattacaggcaaaatagagcggatggtgataaagcccgtcatcaccgactgggcttggcatcgcctgcgcccataagcggtgatgttccggtttgttagccaggtcatcctgtgctttctcgcccagctcgtagtaaaaatcagcgtatttctctaaatactccaccggacaggtgaacgggtgatgcggctcatcatagctaaccaccatcaggaaaggctcgtctgcgcgcgcaggctgttgcagaaaatccaccgcccgattgctgatacgatgcgcccaggtgaaggtttcgtcgatatggttcgcctgtaaatcttcgacgctgtttaggccattgcgccacaggctaatctctttttccgtcagttcgctaagatagttcgccccatcgaaccagtaatcagcgtcccactccggcggacactcgccagtgccgaaatagtcatgaccgtcgagatgccatttgccgatgtaacaggtgtgatagccggcatccttaaagtagcgccccatagtggagatgtttttgcctggcgcgacgttgttggtccacgggccggactggttagcgtagataccggtaaatagtccggcccgtgcaggcgtacaaaccggactacaggtgtaggcggaattaaagcgaataccttccgccgccagactatcaatattttgcgtattcagcggtttaccgctatagcaaccgaccatattggtggcctgggtatcggtcatgacgaacagaaaattggggcgtttcataggctatccttcccgtcgggagtaaaggttacggctgggtcgtgacgatgccgccagctgtcaaaaatcaggtagacaatcactacggcggcaatgaaataactgatcatcgctaaccagcgcgtaccgtagccgccgaattcagccagcccggcatagacgccaatcatcgcgaacaggatgccaatactcgcgatcttgacgtttttccacggtttcatgtccaccgcaaacgcatctttgaaggtgaacggcgtggcgcgcggtttgataaaaccgatcaccagcatcacgaccacgttgatgcagaacgtacaggccagcacatagaggaaatggaagtcgaacttcaccagatagttgatggtgatgtagctgattatgccaatccccatcgctacttttgccgccagcgccgggatgcgcgggaagaaaaagcccataatgatgatggtaaccagcggcacgttgtaaatgccgttgagctgtttcatccagctatacagcccctgcggcgcgttggcgatccacggcgcgaccagcacgctaacgatagcgataaagaaaccaaatttgcgcccgacggtgaccagctgctgcggctcggcattctggttaatgatgcgacggtaaatacccatactgaataacgtactggcgctattcagaaagccgttgaaggtactgatcaccgcaccaaataacaccgcgccgaagaaacccaccattggcactggcagaacgttattgaccagcgtcgggtaggccatgtcggctttcggtaaatcctgatacagatgaaacgcaatcaaccctggcagcaccagtaccagcgggtcgagcattttcagcaccgccgttaacagcgcccccttttgcccttccgccaggcttttactcgccagcgtgcgttgcacgatgccctgatttgtacaccagtaaaaggtgttcaccagaatcaaaccggtaaatgccgcgccaatcggcaagggatcggtcgggccaccgatactgtttaatttctcggcgtgaacggtggtgagttgctcaatgccctgcataaagctgcccttgcccatcgcgattaggccaaataccggcaccatcaacccgccgataaccagcccaataccgttgatggagtccgccactgccattgcgcgcagtccgccgatcaccgcatacaaaattcccgccagaccaagcaaaattaccagtagccagatagccgcaccgtgagaaatctgtaggctttccccgacgtgaaacaggctgttgagcgccaacgcgccggagtagagaacaatcggcagaaagcagacgccggtggcaattaggaagcagaagtcgatgataatacgcgtcgttttatcataacgttcctccagaaaatcggggatggtggcaatgccgcgcttcagatagcgcggtaaaaagattagcgcgaggaagatcagcgtcaccgcactagtcacttcccagcccatcacgctcatgccgcttttgtaggcctgcccggaaaggccgaccagttgttccgtggaaaggttggttagcattaagctagcggcaataaccggcgcttttagactacgtccggcaagaaaatagccttgttggcttccggtatctgttttgcggaccttccaccaggtgatcaccgccaccagcagcgtaaaaccgacaaaactcaagatttgtaagctattcatctcatagcccttatttatgtttatgtcccggacgcatgaatatagggagaggtaaaatgcgtcgggtcaggcagtcagattcttaaaatacaaacgtcgtatccctgaacggattgttttctgttaagttcaggttgtgagcataattcgccggagggatattaaaatgaatggaaaattgcaaagtagtgatgtaaaaaacgaaactccgtacaatattcccttattgattaacgaaaatgtgatctccagcggaatttctctgatcagcctctggcatacctacgccgacgagcattaccgggtgatctggccgcgggacaagaagaaaccgcttatcgccaacagttgggttgcggtgtataccgtacaaggatgtgggaaaattcttttaaagaatggcgaacaaataacactgcatggcaactgtattatattcttaaagccaatggatattcactcttatcactgtgaaggtttagtctgggaacagtactggatggaatttacccccaccagtatgatggatattcccgttggtcagcaaagcgttatttataatggcgaaatttataatcaggaactcaccgaagttgctgagttaataactagtccagaagcaataaaaaataatctggcagtcgcttttctgacgaaaattatttatcagtggatttgtcttatgtacgcagatggtaaaaaagatccacaacggcggcaaattgaaaaattaattgccactttacatgccagtctgcaacaacgctggagcgtagctgatatggctgccacgatcccctgtagcgaagcctggttgcgtcgtctgtttttacgctataccggcaagacgccgaaagaatattacctcgatgcgcgtctggatctggcgctaagcctattaaagcaacaaggaaacagcgttggcgaagtcgctgatacgctcaacttcttcgactcctttcatttcagcaaagcctttaaacataaatttggttatgcgccgagtgccgtgctaaagaatacggaccagcacccaacggatgccagtccacacaattaacgtaactctggccagtacgctttgttggcctccagcaactcatccagaatagctttggcgacgctggcgctcggtaccgttttgctcaacgtaatcgcctgccacaggtgctgataactacgctgttcccaggcgtccacgaccagtttttccaccgccacttgctgactcattaaccctttctgaaactgcgggatatcgcgctccaccagtggttcaggccgtagtagcgcacgcgcatctgtttgcgatcttgcagcccaacaatttgcgccatccggctttcaataccgattggcatgtcacagatgttgaggattttcgcattcgggcgcagacgacgcgtggcttctgcgacaatggctgccgggttggagtagttgagcatccaggcatttggactatatttttccatataatccaccagttccaggacgccgccaatggaacgcatgccgtacgctattccgccgggtccgcaagtttcctgaccaacaacgccgtggcgcagcgggattttttcatccagttcgcgcatcgggtatttgccgacgcggatgtgcgccatgacaaaatcaacgtcgctgaatgccacttcaggatcggtggtgtaactaaacgcaatgtccggcgctttttctttaaggatgactttacaggcttcggcaatcacttcctgccgcgcaccatcgttatcataaaatttcagtgcacgaagcgggaaacggtcctgattcgccaggagcatcaacacgatgcctggcgtaaaggtgcttccaccgcctgcgacaaccacactgaatttggtcattatactgcctccgtaatggcaacattttctgcactttgatgagaattaattaagctatcgagctgttcacgcagctgagatacatgcagaccaatgatcacctgaatggcatcgccactacggaagacgccgtgcgctcccagctttttaaagacttcgtcatccagcgtttgactcatgtcatgcagtgcaatacgtaaacgcgtcgcgcaattgttaatgctggagatattgccgaccccgcccagggcttgcaggataccggcagcctgatccagctctttttttggctctgccgcggtggtttggcctcggctggctttgtattcggctttactgtagagtttcacttccgcatcttcacgtcccggcgtgcacatgttgaactgcagaatcagtgtgcggaaaaccacgaagtacagcagggtaaagcacaacccaatggcgatttgggtcagcatcatatccgcgtggttgctgaacatcgggatccagttttgcggtaaaacttagtcaatcagacctccgcccatgttgcccaccacaccaaagagatacattacggtgctcatactggccgccagcacggcgtgtaccgcaaacagcaacggactaatgaacaggaaggtaaattccagcggttcggtaattcccaccagcatggcggttaaggttgcgggaatcagcaagcccgccacttttacccgattttccggtgcggcagtgaagtacatcgctaaagaaatgcccacggcaccaaagattttactgttaccgtgcagggcaaaaccgccttccgggaacaagcttttcagcggctcggcgctcaaactgaactcttgcagatgctgcgcccagtacatctgaatgccgccttcaacagctgccggaccaaagataaactgtccgtagatgaagtggtgtaaaccggttgggatcagaatacgttcgaggaaggtgtaaacccagaccccaagtgcacccgcgctacgcaggaacgcttgcagagattcaatccccatttgtacttttggccagccgagcaacgtcagccaggcacaggggatcatcaccaggaaggcgataatcaccacataagacgtcccctggaaaatgccgagaaaaaccggcagttttttatcgaacagacggttatgcagcgccgtcacaatgccggaaatgataattgcgccgataatgctggtatcgagggttttaatcccggccatcattgtcagaccgctacctgccaccgcgtcctgagtgaaatcgacgccgaagtagcttccccaggtcattcccatcgcgttgatgaaatagttccaggtcaggaaactcaccatcaccgccagacaagcacgcccctgcgcttgcttagcaaggccaatgggtaaaccgacagcaaaaatcagcggcatattacggaataccgtccaaccgccctcttcaataatgtgtacgatttgcgcgaataaactgttcggatcggtcagactttccccgacaaacatcgggttttgcagcaagatggcaagacccaccacaatcccggcgaagggaaacagcagcactggcgtgaacatcgcgccgccaaagcgttgaatttgactgagcatttccacatcctcttttctcaattctgtaagtaggaagcctgattggttatgcggcaggcctggagcgaggataggaagatgcgatcggcagaacatgacgacccaatgggattcgtgatcgctttcatgcttttcgttgggcggtagagatctacgttttcgcgaaaaagtagacctctgtgagcacaggtacacagcatcgaacacatctttaaaaaaaagatgttttttcaatcgattaagcagaacttgtgtgcgcattacccgggcttgcaggcaaaaaagagatctagagatgatctacaaaagcattgcggagcggttaagaattcgacttaactccgcagatttcacgctaaacagccttcttcccggtgaaaaaaagctggcggaagagtttgcggtaagccggatgaccatccgtaaagccattgacctgctggtagcgtgggggctggtggtccgccgccacggtagtggcacttacctggtgcgcaaagatgtactgcatcaaaccgccagtctgaccgggctggtggaggtgttaaaacggcagggaaaaacggtcaccagccaggtgctgatttttgaaatcatgcctgcgcctccggccattgccagccagttacggattcaaatcaacgagcagatctacttctcccgtcgcgttcgttttgtggaagggaaaccgctgatgctggaagacagctatatgccggtaaaactgttccgtaatcttagcctgcaacatctggaagggagcaagtttgaatatattgaacaagagtgcgggattttgattggcggtaattatgaaagcctgacgccagtgctcgccgatagactgctggcgcggcaaatgaaggtagcggaacacacgccactgctgcggatcaccagcttgagttatagcgagagcggggagtttttgaattatagtgtgatgttcagaaatgccagcgaataccaggtggagtaccatttacggcgactccacccggaaaagagttaaccgatactccagaagagcaccgccagtaattggggggtgataatgcgcaggaacattaccaacggatagacagtggcgtaagagagcgccgccgcaccgctggttggatgaagattattagcaaacgccagcgccggaggatcggtcatggaacctgccagcatcccgcacatggtcaggtaattcattttggctaacatccgcgccagaatgccaacagtaatcagcggaacggcggtgatcagggcaccataaccaatccagcttagcccttcgccattgaccagggtattcacaaaatccccaccagatttcagaccaacgacgctgaggaacagcacgatccccagctcccgcagcgcgaggttggcgcttggcggcataaaccagtacagcttgccgatactgccgatacgcccgaggatcaacgccataatcagcggtccgcccgccagccccagtttcaacgcggccgggaatcctggcacaaagacgggaatagaacctaacaatacgcctagcccgatgccaataaacactggcagcatctgaacctgttgcagtttttgctgcgcattccccagcacattggcaacggcatcaattgcggacggacgccccaccagattgaggatatcgccgaactgcaggctgatatcgccactggcgaccagttcgaccccggcacggttcaggcggctgataacaacgtcatagcgttctttaaagtgcaggtcgcgaatacgttttccgagcacgttttcattggtgaccaccacacgctcgacgcgcaaatcagtgcctttcgtggacaggctagtatcgacctcctgaccaatcaccagttgcgcattatgtaaatccgctggctgacccaccagatgcagcaaatcgcccagttggataatggtatctgggctaggaacttttagggtttcttcgcgtttcagacggctgcagataattttgtcgccgttgagaatcggtacatctttaatggctaaatcatgcaggttagggttctcaacgcgaatattgatagtcttgatcagcgcgccgccattggtgcgactagactcgtgctgctgagcttctgtctcgacattgacgcggaaaataacccgcaacatccacatggtgaacaaaatcccgcaaatgccgaatggatacgccatcgcgtaactcatccccatctgatcgaccatttccattggtgtacccaggtcgcgcaaaatctgctgccctgcccccagcgctggcgtattggtaaccgcaccggagaaaatccccagcactaccggcagtggaatatcaaacagtttatgcaggatggcggtaaccagaccaccgatgatgacgatcagaacagcaaacaggttgaggcgtaatccggagacgcgcaaactggcaaagaagcccggccctacctgaatcccgatagtataaacgaacaggatcaggccaaattcctgaataacatgcagcatatcgctacttaatgtcatccccgcctgagaaacaaaatggccgacgatgatcccaccaaacagcacgccgccaatacctaatcctatgccgcgaaatttgacgttgccgataaacaaaccgacgactgccaccaaagccagaatactgaccgttaatgctatatcactcatcgtccatttctcttgagataacattttaattgctacggattatggctgaatcggtgaagcagatttgccttatagcgcacattatcacgggaaagaacgtgccgaaatatcttaaacagtcgaaatttaacgcattgttgagtaagtaagacaaaaaaagccccaccagaatggcggggcaaagagaatagctagttagctatttaacgcgggacgttcgctgatagcgatacgctgcgctgcgatgggttcaggctcattacgaattaaatcaatatgcagtaaaccgtttacgaaggttgcgccagagacttccatattttcagccagcgtaaagctcaggctaaatggctgattcataagcccttgatgcagccattttttctcttcttttggctgctccggcgtgccttttacgctcaggcgcgtaccttccagttgaatctctaaatcttcctgacggaaacctgccagcgcaagggtaatgcggtagtggttatcgtcgcttttctcaatgttgtacggcgggaagctctggctttcaccggcgttttgcagtgcgttggccagtttgtcaaaaccgatccattgacgcatcagtggggataaatcgaagttacgcatagtcatttctccttctaagaagcgagtaagtacctgcaaatccgaagattcgcatatgctccctgacggcgagcatggagatgtcaggccgcgccaggcggccttagggaattagttgatttcgatacggcgcggttttttcgcttccggaatcacgcgttcgagatcgatatacagcaaaccatttaccaggttagcaccacgaacatgaatgttctcagctaactggaatttgcgttcaaagttgcgttcagcgatgccctggtacagataggtgcgctctttttgttcgtcggcgtgagcacctttcaccaccagcagattatcctgggcggtaatttccagttcgctctcagcaaaaccagccacagcgatagcaatgcggtaatggttttcgtctaccagttcaacgttatacggagggtagccgccattactctggctctggttgttttctaagtggttaaacaaacggtcaaatccaatagcagaacggtaaagcggggataaatcaaagttacgcataatcaatagctcctgaaatcagcgagaatgtaagaccttccacaatggacaggtcaggtagccagaacacccatcaggcgcgtcctcatcggctacgatgtaaaaatgggtctggaaatgaacttttcaagccttatcagcggacttttttttgcagtttatggtctattgcatagactgagggggcagcacgaaacgttaaagtgcgatagccgccacagtgcgacgtaatgatgatgttattttcagcaagggatcgctataactcatcaggccaacacccacgatcaacagatgaatttattatgataagaaatgtgttgttagcgttcatgatatgcagcggaatgacattactcggaggatgctccagcgtgatgtcccataccggagggaaagaaggaacgtatcccggcacccgcgccagcgcaaccatgattggcgacgatgaaaccaactggggcactaagagcctggcgattctcgatatgccgtttaccgctgtgatggacacgcttttactgccgtgggatgtgttccgcaaagacagcagcgtgcgcagccgcgttgaaaaaagcgaagccaacgcgcaagccaccaatgcggttattccaccggccagaatgcctgataactgatttagcgatcagtttcggtgatccacagctggccgccttccatccacgccagccactgaccatccgggctgaagaccacggcgtccgcagaaggactattggcgtggtgttcggttaaatactcaacctcgccgctttgcgcatgggcacaagcaattcgattatccagcacaaagcccaaccattctccactcggatgccagttaaatgcagactgaatatccgttttgttatgggttaactggcgcggctcgccgccctgtgggctgataagccacagttgcacaatgccgttatcatctcgcattaaaaacgcgatttgtgtaccctgcggattacagcgcacccagtggcgcgggacgttgactaaccccggataagcccgatggtgggtaaaggttaaacgtcgctgcacgacgccacgcggtggcgcgggcagggttgtttccgttccgcttaacggcgcatcacctgccgctttccagccagcttcatcttgcggtaactcaacgataaacagctccggcactttctcgccctttgggctaagtgtgtcgccaataaatgccagcgcgtgatttcctacccatccttcttcataagcacgattgatttcatcactgccaggctgtggcgtgggcgtggttttgctcaccagcacgcaccagtggctaccgctgtattcacgcggatgctgcttttgtacgttgaccgggccaaacggcgcagcaacaccgacgtttcgcaaatccagcgccggatcgagttcatgcattacatggtcgttataggtaaagctcaccctttcaccgttcgggctaaagacatgcacatggctgccgccgcgcagcactcctggcgtatacggcgcggtaatatccatcgcatcaaggttactcatcttgccgccttcaacaatcactccgcgccgatgatggaagtcgtaatgccatgtttcatcaggattttccgggccgtggatgaaaacatatttctcactcttcggatgaacggtcaccacgccgacgtgtgcgccctgactcgcgcgatagataacctcgacctcgccggtatggatattcacacgctcaatggtctcgccggtaaagctcgcgccagaaggacgcacgtcaaataccagccactggctgtcgggcgtccaggtattggtattggtgagcaggtgattacggggagcaaaggttatctgtttcatggcgcggtcctgatacaaaacgggtcccgccatcatacttcacaaggacttcactttcagacaatagtcttttgccatcgtgatgaatgtgagtgaaaagatggaacatttcgacgtggcgattattggcctcggcccggcaggaagcgcgttggcacgaaagttagcaggcaaaatgcaggtgatcgcgctggataaaaagcaccagtgtggtactgaaggtttcagcaaaccctgcggcggtctgctggcaccggacgcgcagcgatcttttattcgcgatgggctgacgcttcctgtcgatgtgatcgctaatccgcagattttcagcgtcaaaaccgtcgacgtcgccgcaagcctcacgcgtaactaccagcgaagctatatcaatattaatcgccatgctttcgacttgtggatgaaaagcctgatccccgccagcgttgaggtttatcacgacagcctgtgccgaaaaatctggcgtgaggatgataaatggcatgtcatttttcgtgcagacggctgggagcaacatattaccgcccgctatctggtcggtgccgatggcgcaaacagcatggtgcggcgacatctctacccggatcatcaaatccgtaaatatgtcgctatccagcagtggttcgcggagaaacatccggtgccgttctactcctgcatctttgataatagcataactaactgttatagttggagtatcagcaaagacggttattttatctttggcggtgcctatccaatgaaagacggtcagacgcgtttcacgacgctgaaagagaaaatgagcgcctttcagttccagtttggtaagacggtgaaaagcgaaaaatgcacggtgctgtttcccagccgctggcaggattttgtctgcggtaaggacaacgcctttctgattggtgaagcggcgggatttatcagcgccagcagcctggaggggattagctatgcgctggatagcacagacattctgcgtagcgtgttactgaagcagccagagaagctcaataccgcttactggcgcgccacccgcaaactgcgtttaaaactcttcggcaagatagtaaaaagccgatgcctgaccgcaccggctttaagaaagtggattatgcgcagtggtgtggcacatattccacagttgaaggattaaccaacgcgcttcacatcgcccaccagcaggatataagagagcgcgccaatcaacgcgacggcggagatataaaccagtgcaggtgcgaaaccgtaaccctgcgccaggtaccccaccaccagcggaacggtgatgccgcccagaccaccggcgaagttaaacacgccgccggttaaaccaatcaggcgcatcggtgccagagaagaaaccaggctccaggtaatgctagcaaaaccgttaccgaagaatgccagcgccatcaggcacataatcatcatcggatcgttagtgtagttagcgcccataatgcaggtggagatcagcaagccgcagataatcggcgttttacgcgcaaagcccagactaaagcccttacgtaccagcagatccgctacccagccagagagcaggacgccgacaaacgccgcgaggaatggcaccgtggtcataaagcctgctttcagcgccgtgattcctttttcctgggttaaatagttcgggaaccaggttaagaaaaaccacagtgtagaagccaccgcaaattgcccaagataaacgccgatcagtttacgatggaacaccagtttccagtctttggctgttaacggctgacgcgcctctttcttcaccggcgcatcaccatccaccagaccgccgccatcacgaatgtaatccagttcagctttgctgatacctttggtcaggcgcggcggctgataaaccttaaaccaaatcaggctccagataatgccgataccaccagtgacaatgaacacccagtgccagctcaacatctcctgaatccagatcagcagcggcgtcagaaacgccagaccgacaaactgaccagacgtataaaaaccaacggcagaagcgcgttcatgttccgggaaccagctggtcaccatccggttattggtcgggaaagcaggcgcttcgaaaataccggttatcgcgcgcagaccaattaaactcattaagcccgtggcaaagccctggaataaagtcgccacactccagccaaatatcgcaataaaataagtcacgcgagaacctacgcgatctaaaaaccaaccgccggggatctgacatagcgtataaagccaggcgaaggcgctaaatacatagcccatttccgctttggtaatgccgaactcttcctgaatatgggcggaagccacggccaggttggcgcggtcgacataacaaatgactaccgtaataaagatcatcaccagcgtcagataacgccgacgccccggctttgctgcattaacgggaatatccatagcgagctttctccagattttgggcatagcgaagccgctcaccatgccctgtaatttacagagggttatatttttgtattgctgttttagtgcccgatgaggggcttacgtggcaggaattaccactctgctacgctgttatcttcatgacgccagagcggattacgccagtccggggcatttttactgaactcaatcactttagcttcgtcgatttccacgcctaagcccggtttcgttaacggtttaaagaagccgccgaccatgctgaagtcttctttgtttttcacaaagtcgagtaactccgcgcctttgttgtaatgaattcccatactttgttcctgaagtacggcgttataggaaacaaagtcgatatgcaggcaagccgccagtgcaatcggtccgagcggacagtgcggcgcaagggtcacgtcataggcttctgccattccggcgattttgtagcattcggtaataccgcccgcgtgggagagatccggttgcagaatgctaataccacctgcctccagcacgcgtttaaaatcgaagcgactgaacatgcgttcacccgccgccagtggaatatgcgtttgtgccgccagtttcgggtagtattcggcttgttccgccagcaccggctcctcaataaacagcgggcgatacggctccagttctttaatcagcactttcgccatcggcgcgctgacgcgaccgtggaaatcaagaccaaactcaatctgattgccaaaagcttcacgaatttgtgccacggtgttaaccgccgcatctaccgcgcgggagttatcaattagccccagttcttcacaaccgttcagtttgaaggtatcgaagccgatttcgcgtagcgttttaatgccgtcgataacatccgccggacgatcgccgccaacccaactgtaggctttaattttgtcgcgaaccaggccgcccatcagttgccagaccggcgcattcagcactttacctttgatatcccataacgcctggtcaatcccggcgatggcgctcatcaggatcggaccgccgcgatagaatccggcgcgatacatcacttgccataagtcattgatgcggcttggatcctgaccaatcaaatagtcacccagctcgtgaactgccgcttccaccgtacgggcgcggccttcgatcacgggctcgccccaaccgaccacgccttcatcggtttcaattttcaggaacatccagcggggaggtaaacgatacgtggtaattttggtgattttcattgcactgcctctcgatacgccttaacaaatgctgctgcctgctgcgcggtgcgctctacggattgcccggcgcgatagagatcgctgcctaagcccgcccctgcacaacctgcgtctatccactgcgccaggttttctggcgtcacgccgccaacggcaaagactgcgatgtcgcttggcaataccgcttttaacgctttgatgtattgcggaccaaaagcgctactcggaaatattttcagcgcctgcgcgcccgcttcgagcgcggtaaaggcttcggtcgccgtcgcgcagccggggcagacggtcatgccgtagcccaccgcacggcggatcacttcactatggatattgggcgtaacgatgagctgacagcccatcctggcgagcgcatcgacctgttcaggtttcagtaccgtacctgcgccaatcaacgccttgtcgccgtacgcatcaacgatggcgggaatgctttgctcccattgtggggaattcagcgggatttcaaccgcgtcgaacccggcgtcaatcaccgcgccaacatgcgccagcgcctcgtcgggcgtaataccgcgcaaaatggcgatcagcgggagtttagtttgccactgcatgagcgatgctccttataccagcctgaaatgccgtgtcgcccgccaccgccgtcacgtcgcaacccatcgcctgaaaggcttgctggtagcgcgcggtcaggcttgttccggcgacaagggtgatggcgtgttgatgggccacatagtcgcgcatactggcgacctctgcgccaatcaacaaaccagagagaaattcgctgacctgttcgcggggaagtgttcccagcacatggctggcgcgaacttcaaaaagctgcggcaatatggcgggcgtattaagaccacgctcaaggccagctgtgaaggcatcggcagagttttcctgcggcggcaaacctgcgccaatcaaactgtgatttaacagtaaatgatgtaattcaccggtcatcacggtgcgaaaatcgttgatttgctggctatcggcctgcacccatttgcaatgggttccgggcatgacataaagagaggaaggagccagagctcgcgcgccgatcaattgtgtttcttcgccgcgcatcacattgtggttatcgtcatgagagacacataatccgggaataatccagatattgtcgccaacactcgttaattgttcgccaatagagctaaaacaggcaggaacagataaatacggtgcaactttccagccgacgttgctgccaaccattcctgccattaccactggcgttttctcttcacgccagtcggtcgtgacttctgctaacaccgcagccggagattttccgttcaggcgcgtgacgcctgcttcactttgcctgctctccaggcagtggtcgccctgataaagccaggcgcgcagattggtgcttccccagtcaattgcgatgtagcgagctgtcatgtgatttcctttaaccttcgtgtgctgctggcgatcatggtaagcgccgcctgctctgccgcatcgccgtcctgatgtcgtatcgcatcgaacagcgccttatgttcctggagcgtttgcggcatgttggcctcatcgcccatccaggttcgttcaaaaaccgcccgctgcaggctactgatcgcaatgctaagttgctgtaacaccgggttatgcacgctctgcagcaccgcctcgtggtagcgaatatccgcttcgttaaacgcttcgcggtcctgattgttggcaatcatctcgttcagcgcgctttcaatctgcgccagatcgctggaagtcgcgcgctctgctgcccaacgggcaatcgccggttccaccagatttcgcacttcgctcatggcactgataagccgtgggtcgtagtcattttccagcacccattgcagtacgtcagtgtcgaggtaattccactggttacgcggtgccacaaacgccccgcgataacgtttcatttcaatcagccgcttcgccatcaggctacggaacacctcacggatgatgttgcggctggttgcaaactcctcacagagttccgcctcagccggaagcgggctgcctggcacgtatttgccgtgaacgatctgtttacccagcgtaatgacaatgcgatcggttttattgagagtcatggagagtccttgtgctctgtatgttcttctctactttaccccgatcgatgcataacgcggcaactttgtagtaccagcgtgatgacgttcgcgtttgccgtgcgtgtaatgtagtacaaacttatattgttgtactacaatttagatcacaaaaagaacaatgcataaaaaaatgacatgcgtcgggcagaaatctgaaaagggatatcaggcgctaaacaggagggaaagaagagtatgctttcaacggcttagctactcgtttaaaggattaatcatgaagttgaattttaagggattttttaaggctgccggtttattcccactggcgctgatgcttagtggctgtatcagctatgctctggtttcccataccgcaaagggtagtagtggaaagtatcaaagccagagtgacaccatcactgggctaagccaggcaaaagatagtaatggaacaaaaggctatgtttttgtaggggaaagcctggattaccttatcactgatggtgccgatgacatcgttaagatgctcaatgatccagcacttaaccggcacaatattcaggttgccgatgacgcaagatttgttttaaatgcggggaaaaagaaatttaccggcacaataagcctttactactactggaataacgaagaagaaaaggcactggcaacgcattatggttttgcctgtggtgttcaacactgtaccaggagtctggaaaacctaaaaggcacaatccatgagaaaaataaaaacatggattacagtaaggtgatggcgttctaccatccatttaaagtgcgattttatgaatactatagtcccagaggcattccggatggtgtttccgcagcattactgccagtgactgttacgctggacatcattactgcaccgctgcaatttctggttgtatatgcagtaaaccaataatcagtaagcgggcaaacgcgtttatgctgtttgcccgcccacagattaattcagcacatacttctcaatagcaaacgccacgccatcttcaaggttagatttggtgacaaagttcgccacttctttcacactaggaatagcgttatccatcgccacaccgacgcctgcatattcaatcattgcgatatcgttttcctgatcgccaatcgccatgatttcttccggtttaatacctaacacgtcggccagacttttcacccccgtacctttgttaacgcgtttatcgaggatttcgaggaagtacggcgcacttttcagcacggtatatttctctttcacttcctgcggaatacgcgcgatagcctggtcgaggatggcgggttcatcaatcatcatcactttcaggaactgggtattggggtccattttctccgcttcgcagaacaccagcggaatggtggcaacgaaggattcatgcaccgtgtagtagctgatatcacggttggcggtgtacagcgtggtgcggtccagggcgtggaaatgagaaccgacttcgcgagagagtttttccaggaaacgatagtcgtcatagctgagagcagtttgcgccacggtgctaccatcagcggccttctgtaccagcgcgccgttataagtaatgcagtagtcgcccggctgttccatatgcagctctttcaggtagttgtgcacacctgcatacgggcgacccgtcgttagcacgacattcacgccacgggcgcgagctgcggcaatcgcatttttaacggcgggactaatggtgtgatcgggcagcagaagggtgccatccatatcgatagcaatgagtttaatagccatgagttccccaggtagattggttcctgacccatgctaacgcgattccgctcaaaaatcagtacaacacccgagggaaaagggggatgcaacgcgcgttgcgtgctccctttttgcttagcggaagagtttccctttcagcagttccatgcctgcggaaagcagatcgttattggcttgtggactcacttcaccttgcggactgagcgcatcaataatcttcggcaattgttctgccagtaaactggaagctgtactggtatccacgccaagtttttgcccgagatcggacaccgcatttgtgccgagcgcgctttccagttgctcgccactaacgctttgattgccctgttgattactcagccaggtactgagaatggcccctaagccgccactttgcagtttttccagcagcacctgaatgccgccctgctcctcaacccaacttaaaatagcctgatatttccccgcatcgcctttcagaaaggcaccgacaacttcatcaaaaagccccatgataatcacctgtaaagcgttacgtgttgacccaaaaagtatagatttgcgggatgataattgcggattgcagaaataaaaagggcggagatgatctccgcccttttcttatagcttcttgccggatgcggcgtgaacgccttatccggcctacaaaatcatgaaaattcaatacattgcaagattttcgtaggcctgataagcgtagcgcatcaggcacgctcgcatggttagcgccattaaatatcgatattcgccgctttcagggcgttctcttcaataaacgcacggcgcggttcaacggcgtcgcccatcagcgtggtgaacaactggtcggcagcaatcgcatctttaacggtaacgcgcagcatacgacgactttccgggtccatagtggtttcccacagctgttccgggttcatctcgcccagacctttataacgctggatggagaggccgcgacgggactctttcaccagccagtccagcgcctgctcgaagctggctaccggctgacgacgctcgccacgttcgataaacgcatcttcttccagcaagccacgcagtttctcacccagcgtgcagatacgacgatattcgccaccggtgataaactcgtgatccagcggatagtcagtatccacaccgtgggtacgcacgcgaacaatcggctcgaacaggttttgctcagcattggtgtgaacatcaaacttccactggctgccgtgctgttctttgtcgttcagttcgctgaccagcgcgttcacccagcgggtaacggtctgctcatcagaaaggtcagcttccgtcaacgtcggctgatagataagctctttcagcattgctttcggataacgacgctccatacgattgatcattttctgcgtcgcgttgtactcagataccagtttctctaacgcttcgccagccaatgccggtgcactggcgttggtgtgcagcgttgcgccgtccagcgcgatagagatctggtactgatccatcgcttcgtcgtctttaatgtactgttcctgcttgcctttcttcactttgtacagcggcggctgagcgatgtagacgtgaccgcgttcaacgatttccggcatctgacgatagaagaaggtcaacagcagcgtacgaatgtggctgccgtcgacgtccgcatcggtcatgatgatgatgctgtgataacgcagtttgtccgggttgtactcgtcacgaccgataccacagccaagcgcggtgataagcgtcgccacttcctgagaagagagcatcttatcgaagcgcgctttctcgacgttgaggattttacccttcagcggcagaatcgcctggttcttgcggttacgcccctgcttcgcagagccgcccgcggagtccccttccaccaggtacagttcggaaagcgccggatcgcgttcctggcagtctgccagtttgcccggcaggcccgctaagtcgagcgcacctttacggcgggtcatttcacgcgcgcgacgcgccgcttcacgggcacgggcagcatcgataattttgccaaccacgattttcgcgtcggttgggttttccagcaggtattctgccagcagttcgttcatctgctgttcaaccgcgcttttcacctcagaagaaaccagtttgtctttggtctgggaggagaatttcgggtccggcactttcacggaaacgaccgcaatcaggccttcacgcgcatcgtcaccggtggcgctgactttggcttttttgctgtagccttctttgtccatgtaggcgttcagggtacgggtcatcgccgcacggaagcctgccaggtgagtaccgccgtcacgctgcggaatgttgttggtaaagcagtagatgttttcctggaagccatcgttccactgcaacgccacttcgacgccaataccgtctttttcagtggagaagtagaagatattcgggtggatcggcgttttgttcttgttcagatattcaacgaacgccttgatgccgccttcatagtggaagtggtcttctttgccgtcgcgcttgtcgcgcagacgaatggaaacgccggagttgaggaagctcaactcacgcagacgtttcgccagaatttcatattcgaactcggtcacattggtgaaggtttcgaggctgggccagaaacgcaccatggtgccggttttttcagtctcgccggtaaccgccagcggggcctgcggtacaccgtgttcgtagatctgacggtgaattttaccctcgcgctggataaccagctccagtttttggctcagggcgtttactacgctaacaccaacgccgtgcagaccgccggacactttataggagttatcgtcaaatttaccgcctgcgtgcagaacggtcatgatcacttccgccgcgcttacgccctcttccgggtgaataccggtcggaatgccgcgcccgtcatcctgtacagagacagagttatcggcgtgaatggtgacgataatttctttacagtgacccgcgagcgcttcgtcgatagcgttatctaccacctcgaataccatgtggtgcagaccggtgccgtcatccgtgtcgccgatatacatacccgggcgcttacgcaccgcatccagccctttcaggactttgatactggaggagtcataagaattgctcatcaacgtttctcgctcatttatacttgggttaatccgttattttacccttttccacggtaaacatcttgctattttcgtcgctcatgtctataacgtgttcagcactgatcgcgctgacaaagacctgactttgcgtcgcttttaagcggctggcaagcagcccgcgacgctcatcatcaagctcagaggcaaaatcatctatcaggtagagacaccgccgcccgctttcacgggtgaggaactctccttgcgccagacgtaaggcgcacatcaacagcttaagctgcccacggcttaaggtatcttccaccggcgcaccgtcggcgcgaatgcgtaagtccgctttgtgcgggccgtgcgcggtgtaggttagctggcgatcgcgttcaaaattacgttccagcacctcagcatattctgtctctttctcccagccgcgctggaaagagaaagtcagagaaaactcagggagaaattgcttacaggtatcagccatatcggccgcgataccggcgctatactccgcgcgccaggtgctgatttgctccgccagcgggatcagctctttatcccacgggcgtagctgttcgtaacgtgtcacctggcgcagcgccgcattgcgctgcttgagcaatcgcttgagattgctccaggcggtgaaaaatccgggttcgttgtgaaagcatccccagtcgaggaatgctcttctgtatttggggccgccgttgagtaaagtaaacccttctggcgttatcaactgcattggcatcaggtgcgccagttccgcgaccttatgcccgtctgtaccgtcgatgcggactttgctgtcgccctgtttgtctttggttaagccaatcgctgtctcgcgctcttcgccctgtaatcgcccgtggagaacaaacgcctcctgctcatggcgaatgacgcgaccaatctgcaaactgcgaaacgcccgaccatggccgagcgtatagatggcttccagcacgctggttttgccactgccgttggcacctaccagaaagttaaagccgggagataaggcgagatccgcggtttcaatgttgcggaaatcgcggatcaacaagcgggtgagggacattacagtctcattggcatgacaacataagccgcgctctggctggccgcatcttcaatctgcacgctggaaacgctatcggtcagcatcatgcggacgttttcgcatttcagcgcgttcagaacatccagcacataactgacgttgaagccgatttccatctccgcaccgctataggtaacgtcgaggatctcttccgcttcttcctgttccgggttgttggcggtgattttcagctggttttcgctgacataaagacgtacgccgcggaatttctcgttagagagaatcgccgcgcgagcaaacgcctgcttgagcagatcgcagccagcttccagatgtttgtccgggttcttcggcagaacgcggcgataatccgggaagcgaccatccaccagtttggaggtgaagataaagtcgccaacgtgggcgcgaatgttgttgctgccaatctgtacgcgcagcggattgtcgccgccgtcgagcatacgcatcagttcaatcacgcctttacgcggtacgatcacgctatggcttggcaaagattgaccaattggcatactacagaccgccagacggtggccgtcggttgccacggtgcgcagttcttcaccttcggtttcaaacagcataccatttaagtaatagcgaacgtcctgatgcgccatagaaaactgggtcgcttcaatcagacgcttcatcgttgcctgcggcagggtaaattcgacttcactctgccagtcatcgaggttcgggaaatccgccgctggcagggtagacaggctaaaacggctacgcccggagcgtaccagcatccgttcaccttccagctgcacggcaatttccgcgccttcaggcagaccacggcagatatcaaagaatttgcgcgccggaacggtcgtcgctcctggctcgtgtggctgaaccagcgcaacacgtgccaccatttccatctcgagatcagtaccggtcaggctcaacgtaccgtcagcaacctgtaacagcagattaccgagaatcggtagcgtaggacgaccacctaacggaccgctcacctgttgtagcggttttaataaatgctcacgttctacggtaaatttcataggtttagctactcaatgttctgattaaattactaaaatcttctttgatatcgtggctctcttcacgcaactgctcgatcttacggcaggcatgaagcaccgtcgtgtggtcacggccaccaaacgcatcgccaatctccggcagactgtggttagtcagctctttcgccagcgccatcgccatctggcgcggacgcgccacgctgcgggatcgacgcttggaaaggagatccgcgactttgatcttgtagtactccgccaccgtcttctgaatattgtcgatggtgaccagtttttcctgcaatgccagcaagtcgcgcagcgcctcacgcacgaagtcgatggtgatcgcccgtccggtaaagttggcattggcaatgacgcggttcagcgccccttccagctcacgtacgttagatcgtagacgcttggcgataaagaacgccacttcgcccggcaaacgaatgtcgttttcgtcggcctttttcatcaggatcgccacacgggtttccagctctggcggttcgatcgccacagtcagtccccaaccgaagcgggatttcaaacgatcctcaacgccgttgatctctttcggatagcgatcgctggtgagaatgatctgttgattaccttccagcagggcgttgaaggtgtggaaaaactcttcctgagatcgttctttattagcaaaaaactgaatatcgtcgatcagcagtgcatctacggaacggtagtagcgtttaaactcttcgatcgcgttgttttgcagggctttaaccatgtcctgaacaaagcgctcggagtgcatataaaccactttggcattcggcttgcgcgccataatgccgttacccaccgcatgcagcaggtgagttttacccagacccgtgccgccataaaggaacaacgggttataggcaccgccagggttatccgccacctggcgagccgccgcgcgcgccagttggttagatttaccttcaacgaagttatcaaacgtgtgtttgacgtttacgttagaacgataggtcggttctgccggggccgggacgttatcccaaccactgcgcgtagaaggcgcagcacgttgcggctgcgtttgcgccacctgtgcaggggccgcgacgttgctcgtcactgccgcttgtggcgtttgcgtcaccggtttggtgccgacttcaaaacgcagctgtggggcatccgctccgcagaaactggttagcagtccattgatattattaaggtacttgtcccgtacccaatcgaggacaaaacggtttggcgcgtacagggccagcgtgttatcgctcagttccgcctgcaatgggcgtatccacatactgaattctgtggctggtaactcatcctgcaatcgggcaagacactgctgccaaaggctaagactcacggcggactccactcgaacaaaagtcgataatgactaaggctgaaacattcatgattgttgacgtacgtcgaaaagaccctgcttgagggtgacgcacgaaccgctgtctgcggttatatgcccgatcaagatcctgcaaaacgatcgggaccgcggatcatagcctaaactgcgcaagagatcttctgtttctcacagattttcccgatttatccacaggactttccagaactcgctaagtgtaaacgatcctgccgcgaggcgggcacgatttacgccgcatattggaaaatttaatgaccatagacaaaaattggcttaatcgatctaataaagatccaggacgatccttgcgctttacccatcagcccgtataatcctccacccggcgcgccatgctggtttccactggtgtgaggtcgtacattttccctgcgaaaaggtgcggaaaagcgcggtaaataaggaaagagaattgactccggagtgtacaattattacaatccggcctctttaatcacccatggcttcggtgtccatcgtttcatttttcggcggatatccaataaagccattgaatttattcaagtttaggtagaaatcgccatgaaacgcacttttcaaccgtctgtactgaagcgcaaccgttctcacggcttccgtgctcgtatggctactaaaaatggtcgtcaggttctggcacgtcgtcgtgctaaaggccgcgctcgtctgaccgtttctaagtaataaagctaacccctgagtggttaagctcgcatttcccagggagttacgcttgttaactcccagtcaattcacattcgtcttccagcagccacaacgggctggcacgccgcaaattaccattctcggccgcctgaatagcctggggcatccccgtatcggtcttacagtcgccaagaaaaacgttcgacgcgcccatgaacgcaatcggattaaacgtctgacgcgtgaaagcttccgtctgcgccaacatgaactcccggctatggatttcgtggtggtggcgaaaaaaggggttgccgacctcgataaccgtgctctcagcgaagcgttggaaaaattatggcgccgccactgtcgcctggctcgcgggtcctgacttaatcggaagcgttggaaaaattatggcgccgccactgagccctggcagccgggtcctgatagccctcattcgggtctatcaacgcctgattagtccgctactcgggccgcattgtcgtttcactccaacctgtagtagctacggaattgaggcattgcgcaggtttggagtgataaaaggcagttggttgacggtgaaacgcgtattaaaatgccaccctttacaccctggtggtgacgatcccgtcccgcccggaccatttgataccagagaacactaacgatggatagccaacgcaatcttttagtcatcgctttgctgttcgtgtctttcatgatctggcaagcctgggagcaggataaaaacccgcaacctcaggcccaacagaccacgcagacaacgaccaccgcagcgggtagcgccgccgaccagggcgtaccggccagtggccaggggaaactgatcagcgttaagaccgacgtgcttgatctgaccatcaacacccgtggtggtgatgttgagcaagctctgctgcctgcttacccgaaagagctgaactctacccagccgttccagctgttggaaactagtccgcagtttatttatcaggcacagagcggtctgaccggtcgtgatggcccggataacccggctaacggcccgcgtccgctgtataacgttgaaaaagacgcttatgtgctggctgaaggtcaaaacgaactgcaggtgccgatgacgtataccgacgcggcaggcaacacgtttaccaaaacgtttgtcctgaaacgtggtgattacgctgtcaacgtcaactacaacgtgcagaacgctggcgagaaaccgctggaaatctccagctttggtcagttgaagcaatccatcactctgccaccgcatctcgataccggaagcagcaacttcgcactgcacaccttccgtggcgcggcgtactccacgcctgacgagaagtatgagaaatacaagttcgataccattgccgataacgaaaacctgaacatctctagcaaaggtggttgggtggcgatgctgcaacagtatttcgcgacggcgtggatcccgcataacgacggtaccaacaacttctataccgctaatctgggtaacggcatcgccgctatcggctataaatctcagccggtactggttcagcctggtcagactggcgcgatgaacagcaccctgtgggttggcccggaaatccaggacaaaatggcagctgttgctccgcacctggatctgaccgttgattacggttggttgtggttcatctctcagccgctgttcaaactgctgaaatggatccatagctttgtgggtaactggggcttctccattatcatcatcacctttatcgttcgtggcatcatgtacccgctgaccaaagcgcagtacacctccatggcgaagatgcgtatgttgcagccgaagattcaggcaatgcgtgagcgtctgggcgatgacaaacagcgtatcagccaggaaatgatggcgctgtacaaagctgagaaggttaacccgctgggcggctgcttcccgctgctgatccagatgccaatcttcctggcgttgtactacatgctgatgggttccgttgaactgcgtcaggcaccgtttgcactgtggatccacgacctgagcgcacaggacccgtactacatcctgccgatcctgatgggcgtaacgatgttcttcattcagaagatgagcccgaccacagtgaccgacccgatgcagcagaagatcatgacctttatgccggtcatcttcaccgtgttcttcctgtggttcccgagtggtctggtgctgtactatatcgtcagcaacctggtaaccattattcagcagcagctgatttaccgtggtctggaaaaacgtggcctgcatagccgcgagaagaaaaaatcctgattcggtgagttttcgctaaaataagggcggtcagttgaccgccttttttcttttcgtagggcggataagcaccgcgcatccgccacacaaagcaacaggaacatcatgagcgataatgacactatcgtagcccaggccacgcctccgggacgtggcggcgttggcatcctgcgcatctccggcttcaaagcccgtgaagttgccgaaaccgtgctgggtaaactgcctaagccgcgctacgccgattatcttccgtttaaagacgccgacggcagcgtgctcgatcaggggattgcgctatggttccctggcccgaacagcttcaccggcgaagatgtgctggaactgcaaggtcatggcggtccggtgatcctcgacctgctgttaaaacgcattctgaccattcccggcctgcggattgctcgccctggtgagttttccgaacgcgcgtttcttaacgataaacttgacttagcccaggccgaggcgattgccgatcttatcgacgccagtagcgaacaggcggcccgtagcgcacttaacagcctgcaaggcgcattctccgcacgggttaatcatctggtagaagccctcacccacttgcgcatttacgtcgaagcggcaattgatttccccgatgaagagatcgatttcctctccgacggaaaaattgaagcccagctcaatgacgttattgccgatcttgatgcagtgcgtgctgaagcacgtcagggtagtttgttgcgcgaagggatgaaagtggtgattgccggacgtcctaacgccggtaaaagcagcctgttaaacgcgctggcggggcgtgaagcggcaatcgtaaccgatatcgccggaactacgcgtgacgtgctgcgtgagcatatccacattgacggaatgccgctgcatatcatcgataccgccgggctacgtgaagccagtgacgaagtagaacgtattggtatcgagcgcgcgtggcaggaaattgaacaggccgaccgcgtgctgtttatggtcgatggcaccacaacagacgccgtggatccggcagagatctggccggaatttattgcccgtctgccagcgaaactgccgatcaccgtggtgcgcaataaagccgatatcaccggcgaaacgctgggaatgagtgaagtgaacggtcacgcgttaattcgtctcagcgcaaggactggtgaaggcgtggacgtgctgcgtaaccatctcaaacagagcatgggctttgacaccaacatggaaggcggcttcctggcgcgtcgtcgccacctacaggcgctggaacaggcagcggaacatctacaacagggcaaagcgcaactgttgggagcctgggcaggtgaactgctggcggaagagttgcgtctggcacagcagaacttaagcgaaatcaccggggaatttactagtgacgacctgctggggcggattttctccagcttctgtattggtaagtaaccgcgcttacgaggccgcattctgactgtcagatgcggcttcgcttcattgttaccactcctgttattcctcaaccctttttttaaacattaaaattcttacgtaatttataatctttaaaaaaagcatttaatattgctccccgaacgattgtgattcgattcacatttaaacaatttcagaatagacaaaaactctgagtgtaataatgtagcctcgtgtcttgcgaggataagtgcattatgaatatcttacatatatgtgtgaccagtaaatggttcaatattgacaacaaaattgtcgatcaccgcccttgatttgcccttctgtagccatcaccagagccaaaccgattagattcaatgtgatctatttgtttgctatatcttaattttgccttttgcaaaggtcatctctcgtttatttacttgttttagtaaatgatggtgcttgcatatatatctggcgaattaatcggtatagcagatgtaatattcacagggatcactgtaattaaaataaatgaaggattatgtaatggaaaactttaaacatctccctgaaccgttccgcattcgtgttattgagccagtaaaacgtaccactcgcgcttatcgtgaagaggcaattattaaatccggtatgaacccgttcctgctggatagcgaagatgtttttatcgatttactgaccgacagcggcaccggggcggtgacgcagagcatgcaggctgcgatgatgcgcggcgacgaagcctacagcggcagtcgtagctactatgcgttagccgagagtgtgaaaaatatctttggttatcaatacaccattccgactcaccagggccgtggcgcagagcaaatctatattccggtactgattaaaaaacgcgagcaggaaaaaggcctggatcgcagcaaaatggtggcgttctctaactatttctttgataccacgcagggccatagccagatcaacggctgtaccgtgcgtaacgtctatatcaaagaagccttcgatacgggcgtgcgttacgactttaaaggcaactttgaccttgagggattagaacgcggtattgaagaagttggtccgaataacgtgccgtatatcgttgcaaccatcaccagtaactctgcaggtggtcagccggttagtctggcaaacttaaaagcgatgtacagcatcgcgaagaaatacgatattccggtggtaatggactccgcgcgctttgctgaaaacgcctatttcatcaagcagcgtgaagcagaatacaaagactggaccatcgagcagatcacccgcgaaacctacaaatatgccgatatgctggcgatgtccgccaagaaagatgcgatggtgccgatgggcggcctgctgtgcatgaaagacgacagcttctttgatgtgtacaccgagtgcagaaccctttgcgtggtgcaggaaggcttcccgacatatggcggcctggaaggcggcgcgatggagcgtctggcggtaggtctgtatgacggcatgaatctcgactggctggcttatcgtatcgcgcaggtacagtatctggtcgatggtctggaagagattggcgttgtctgccagcaggcgggcggtcacgcggcattcgttgatgccggtaaactgttgccgcatatcccggcagaccagttcccggcacaggcgctggcctgcgagctgtataaagtcgccggtatccgtgcggtagaaattggctctttcctgttaggccgcgatccgaaaaccggtaaacaactgccatgcccggctgaactgctgcgtttaaccattccgcgcgcaacatatactcaaacacatatggacttcattattgaagcctttaaacatgtgaaagagaacgcggcgaatattaaaggattaacctttacgtacgaaccgaaagtattgcgtcacttcaccgcaaaacttaaagaagtttaattaatactacagagtggctataaggatgttagccactctcttaccctacatcctcaataacaaaaatagccttcctctaaaggtggcatcatgactgatcaagctgaaaaaaagcactctgcattttggggtgttatggttatagcaggtacagtaattggtggaggtatgtttgctttacctgttgatcttgccggtgcctggtttttctggggtgcctttatccttatcattgcctggtttagtatgcttcattccgggttattgttattagaagcaaatttaaattatcccgtcggctccagttttaacaccatcaccaaagatttaatcggtaacacctggaacattatcagcggtattaccgttgccttcgttctctatatcctcacttatgcctatatctctgctaatggtgcgatcattagtgaaacgataagtatgaatttgggttatcacgctaatccacgtattgtcgggatctgcacagccattttcgttgccagcgtattgtggttaagtagcttagccgccagtcgtattaccagtttgttcctcgggctgaagattatctcctttgtgatcgtgtttggttcttttttcttccaggtcgattactccattctgcgcgacgccaccagctccactgcgggaacgtcttacttcccgtatatctttatggctttgccggtgtgtctggcgagttttggtttccacggcaatattcccagcctgattatttgctatggaaaacgcaaagataagttaatcaaaagcgtggtatttggtagcctgctggcgctggtgatttatctcttctggctctattgcaccatggggaatattccgcgagaaagctttaaggcgattatctccagtggcggcaacgttgatagcctggtgaaaagcttcctcggcaccaaacagcacggcattatcgagttttgcctgctggtgttctctaacttagctgttgccagtagcttctttggtgtcacgctggggttgttcgattatctggcggacctgtttaagattgataactcccacggcgggcgtttcaaaaccgtgctgttaaccttcctgccacctgcgttgttgtatctgatcttcccgaacggctttatttacgggatcggcggtgccgggctgtgcgccaccatctgggcggtcattattcccgcagtgcttgcaatcaaagctcgcaagaagtttcccaatcagatgttcacggtctggggcggcaatcttattccggcgattgtcattctctttggtataaccgtgattttgtgctggttcggcaacgtctttaacgtgttacctaaatttggctaaatccttcaagaagccagccattcgctggcttcttgcctctcaggaaatcacttatgtccaaatggcaactcgcctgatcctccttcaccacgtatgctttgcgtcaccttactatcaggacgctttagcccatgtcccgctttttgatttgtagttttgccctggttttactttatcccgccgggattgatatgtacctcgttggtttaccgcgcatcgccgccgatctcaatgccagcgaagcgcagttgcatattgcgttctccgtatatctggcggggatggcagctgcgatgttatttgccggtaaagtggccgatcgtagtgggagaaagccggtcgccatacccggcgcggcgctatttattattgccagcgtgttctgtagtctggctgaaaccagcacgttatttcttgcaggccgatttctacaggggttgggcgcaggctgttgttacgtagtggcgttcgctattttgcgcgacacgctggatgatcgacgtcgggctaaagtgctgagtttactcaacggtattacctgcatcattccggtgttagcgccagtgctcggacatctgattatgcttaaattcccgtggcagagtctgttctgggcgatggcaatgatgggcatcgcggtactgatgttgtctttgtttattttaaaagaaacgcgcccagcggcccccgcagctagcgataaaccacgagaaaatagcgagagcctgcttaaccgttttttcctcagccgtgttgttatcaccaccctcagcgttagcgtgatcctcactttcgtcaacacgagtccggtattgctgatggaaatcatggggtttgagcgcggtgaatacgccaccattatggcgctgaccgctggcgtcagcatgaccgttagtttctccacgccatttgcgctgggaatttttaagccacgtacgttgatgatcaccagccaggtgttattcctggcggcggggatcactcttgccgttagtccttcccatgcggtttctctgtttggtatcacgctgatttgcgccggtttcagcgtaggttttggtgtggcgatgagtcaggcgttagggccgtttagtttacgcgcgggcgtagccagcagcaccttaggtattgcgcaggtttgcggtagcagtctgtggatttggctggcagcggtggttggtatcggcgcatggaatatgctgatcgggattctgattgcctgtagcatagtgagcctgttgctgattatgttcgtcgcgcctggacgccccgttgccgctcatgaagaaatccatcaccacgcttgatctcaatctgctgctttgtctgcaactgctgatgcaggagcgcagcgtaaccaaagcggcgaagcggataaacgtgacacctagcgcggtgagtaagagcctggcaaagttaagagcgtggtttgacgacccgctctttgtgaacagtccgctgggtctgagccccacaccgctgatggtcagcatggagcaaaatctggcggagtggatgcaaatgagcaacctgctgctggataaaccgcaccaccagacaccgcgcggcctgaagtttgagctggcggcggaaagtccgctgatgatgatcatgcttaatgcgctgagcaaacagatctaccaacgttacccgcaggcgaccatcaaattacgtaactgggattacgattccttagatgccattactcgtggtgaagtggatatcggtttttccggtcgcgaaagccatcctcgcagccgggagctgttaagcagcctaccgttagccattgattatgaagtgctgtttagtgatgtgccctgcgtctggttacgcaaagatcatccggcactgcatcaaacgtggaatctggacaccttcttacgttatccgcatatcagcatttgctgggaacagagcgatacctgggcgctggacaatgtgttacaggagctgggacgcgaacgcacgattgctatgagcctgccggaattcgagcagagtctgtttatggcagcgcaacccgacaatctgctactggcgaccgcgccgcgctactgtcagtactacaatcaactccatcaactgccgttggttgctcttcctctcccgtttgacgaaagccagcaaaaaaagctggaagttccttttaccctgctgtggcataaacggaacagccataatccgaagatcgtctggttacgggaaaccattaaaaacctttacgcgagcatggcataaccgaatcgtatgaaacgcgacccaatttcacaataaaatgtaaaaaagttgtaataagcttgtctgaatcgaacttttagccgctttagtctgtccatcattccagtaaatgattactcttgtattcataatggaccattaagcatggagcgaaaaatggcgactcactttgcccgagggattttaacggaaggacatctgatttctgttcgtctcccctcccagtgtcatcaagaagcccgaaacattccccctcatcgtcaaagccgttttctggcgtccagaggtttactcgcagaactgatgttcatgctgtatggcattggcgaattgccggaaatcgtcaccctgccgaaaggtaaaccggttttcagtgataaaaatttgcctagcttttccatttcctatgccgggaatatggttggcgtggcgttaacaaccgaaggtgaatgtggcctcgatatggaactacagcgtgcgacgcgcgggtttcatagcccacacgcgcccgataaccacaccttttccagcaatgaaagcctatggatcagtaaacaaaacgatcctaacgaagcgcgggcgcagctcatcacgctgcgccgaagcgtgctaaaactaaccggtgatgttttgaatgacgatccgcgcgatctgcagctgctgcccattgccggacgcctgaaatgtgctcatgtaaatcatgtagaagcgttatgcgacgcggaagacgtgctggtgtggtccgtggcggtcacgcccacgattgaaaagctcagtgtctgggagttagatggcaaacacggctggaaaagcctgccggatattcacagccgcgccaacaatcctaccagccggatgatgcgttttgcccaactctctaccgtgaaggcttttagcccaaattgatagacaaccacaggagtcatcatgtctgaaaaattgcaggtggttacgttactggggagcctgcgcaaaggcagttttaatggcatggttgcacgtaccctgccgaaaattgctccggcgagcatggaagtcaatgcgttaccatccattgccgacattcccttgtatgacgctgacgtacagcaggaagaaggttttccagcaacggttgaagctctggcggaacagatccgtcaggctgacggtgtggtgatcgtcacgccggaatataactacagcgtaccgggtgggctgaaaaatgccatcgactggctttcccgcctgccggatcaaccgctggccggtaaaccggtattgattcagaccagcagtatgggcgtgattggcggcgcgcgctgtcagtatcacctgcgccagattctggttttcctcgatgcaatggtgatgaacaagccggaatttatgggcggcgtgattcagaacaaagttgatccgcaaaccggagaagtgattgatcagggtacgctggaccacctgaccgggcaattgaccgcatttggtgagtttattcagcgagttaagatctaaataaaaaacccgccagcaatcatgcatggcgggtttttaacgcgctatcgattttagtgagcgtcgataaagacaatcttcaggataaacagcagcgcaacgatgattacgcacgggcttagatcacgcagacgtccggtaccgattttcatcacgcagtaggagataaagcccagcgcgataccttcggtaatgctgaagctgaacggcatcatcacggcggtaataaacgccggaacagattcagtaagatcctgccagttcacgcgtgccagactggaagtcatcagcacgccaacgtaaatcagcgcaccagctgcagcgtagcctggcaccatccccgccagcgggctcagaaagataaccagcaggaacagcagaccaacaaccactgccgtcagaccggtacgaccgccaacgcttacgccggaagaggactcaatataagccgtaacggaagaagtaccgataaagctaccggtcacggaagagatactgtcgacatacagcgcctgcttcatgcgcgggaatttccccttctcatccgccagacctgctttatcggtcacgccaatcagcgtaccggaggagtcaaacaagttgaccaacatgaaagagaaaatcacccctgccagcccgaggttaaagctcccggctaaatctacatgacccacaactgtcattacgctcggcggcgcagaaacgatgccattgtagtgcacatcacccagcatccagcccagcagcgtcgtcaccacgatagaaaccagcaccgctgcgtgaatgttgcggctggccagaatagcaatgatgaagaagccgaggatacccagaagtacgctgtgagaagtcagattaccgatgctcaccagcgtttccgggttagcgacaatcacacctgcgtttttcagccccatcatgccaatgaacagaccgataccgctggtaatacccacacgcagactcaccggaatgttggctatcatccagtagcgaacgcggaaaatcgtcagtaacagcagacctatcgcgccccagaagattgcgcccatcccgacctgccacggcaagcccatcgcctgtacaacgacaaaagcgaagaacgcattcaggcccatagcgggtgccagtgcaactggcaggttagcaaacagtcccatcataatactgccgaatgcagcgatcagacaggtagtgacgaagacggcgctggtatccatgccagcaacgccaagaatttgcgggttaacaaaaacgatgtaaaccatcgtcaggaaggtggtaaaaccggcgatcacttcggtccgtgccgtcgtgccatgttcgcgcagtttaaacacgcgttccagcatcccctgaccagaagtctgggtggtatgttgatgactcattatctatttccgaacaaggagggaaaatccgtcgctatcgtataccaaaatgcgacaataggcgcgtttgtgagagacttttttattggatttacttatacggcaacgattgcgttgcgcaaatcggctctacgaaaacgttaaactgattaaaaaggaaaggcatgtcccggatagaagcggtatttttcgactgcgacggtacgctggtcgacagtgaagtcatttgctctcgcgcatatgtaacgatgtttcaggaatttggtattacgctcgatcctgaagaggtattcaaacgtttcaaaggtgtaaaactgtacgaaattatcgatattgtttcccttgaacatggtgttacgttagcgaaaacagaagctgaacacgtttaccgtgcagaagtcgctcggctgttcgatagtgaactggaagccatcgaaggggctggagcgctcctgagtgcgatcactgcgccaatgtgtgtggtatctaacggcccaaataacaaaatgcagcattctatgggcaagctgaatatgttgcactacttcccggataaactgttcagcggctacgatattcagcgctggaagccagacccggcgttaatgttccatgcggcaaaagcgatgaatgtaaatgtagaaaactgcattctggttgatgacagtgttgccggtgcacaatctggtatcgacgcaggtatggaagtgttctacttctgcgccgacccgcacaataagccgatcgttcacccgaaagtcaccacctttacccatcttagccagttacctgaactgtggaaagcgcgtggttgggatattacggcataattcttcacactcccttcacttaccccgcttaaattggcgctcaaaggtaagtaaagggagtttgatatgtctgttagtcgtcgggtaatacatcacggactttattttgcagttttaggaccgttaattggtgttctgtttcttgtcctctacatattcttcgcaaaagaaccgctggttctttgggtgataatacatccaatttttctcttattgagcataactacgggagctattcctgcgttgttaaccggtgtaatggttgcctgtctgccggaaaagatcgggagtcagaaacgttatcgttgtctggctggtggcataggtggcgtcgttatcaccgagatctattgtgcagttattgtacatattaagggcatggcttccagcgagttgtttgaaaacattctttctggtgacagtctcgttgtccgcatcattcctgcattgctggcaggtgtggtgatgagcagaatcattacccgtctacccggattggatattagttgtcctgaaacagactctttaagttaagcgggatactttatctttgggctactcaaaagcagacaggatgtttctatgactcaaaatatcaggccgttaccccaattcaaatatcatcccaagccactggaaacaggcgcatttgaacaggataaaaccgtagagtgcgattgctgtgaacaacagacgagtgtttattacagcggtcccttttattgcgttgatgaagttgaacatctctgtccgtggtgtattgcggacggttctgctgctgaaaagtttgcaggtagttttcaggatgatgccagcatagaaggtgttgaatttgagtatgatgaagaggacgaatttgccggtattaagaacacatatcctgatgaaatgctgaaagagttggttgaacgcacgccaggttatcatggatggcagcaggaattctggctcgcgcattgtggcgatttctgtgtttttatcggctatgtgggctggaatgatataaaagatcgcctcgatgaatttgccaaccttgaagaagattgtgagaatttcggtattagaaattctgatctagctaaatgcctgcaaaagggtggtcattgtcagggttatctcttccgctgtctccactgcggcaagctgagactgtggggtgattttagctaattatttaaataatgagaacaggccggagcgtaattcacacatccggccttatttcttaagcttaaccgagtgctaattctgcggcagcggctttatcagcgattaccatcaggctaggatgcagctgcaacacggaagctggaacatcttcggtaaccggaccttgcagaacatttttcagtgcctgcgctttacccgcgccgctgacaattatcagcaagtttttcgccgccatgatgcttttcggccccatcgtcacgtagctgtcaggcactaagctaaagtcgccgcccaactcgccatgcgccacaatatcaaccatctctccctggatcgggaactccacggtttgctcatggaaatgggtcgtattcggcaaattgccacaaaaatgaccatctgcacctaatcccagcaccaccaaatccagtccgccttcacgcgccagtttctgatcatgctcgcggtagttatcaatagtgagcttctggatattctcttctttgatccccgcaggggtgaaaaacagattacgcagattggtaatcgttacgccttctccctctttgccgcgaaatggaatttcatcaaaattatagaaatagcagttatcgtaccagggcttacctttaaccagggtggtgaggtattcatacatgcctttgggcgtgctaccggcggtaattgccaggttaacacgacgcgtcttgctcatataaccaagcagatggtgtgccgcgacacggctcatttcctggtaatcttcggtaatgattaatttcatcttaatgccttattttatttaaataatttctgtacaaaggctgcataggctggtcgccagacatccatttcatggttcagacccggatattcctggtaatcaaagttaatttttttctgctcaagctcagttttcagcccggcgatatccttgccggttacgacatctttatcccccacaaccacagtaaaattacgtagttgctggttgatagctgccggatcgttcagtcgggccgcgacaccttcatccggtacggttgtcgtggtaacaccactgaatgtggccagccagccaaagctttccagatgattcattccggaaaccagcgcctggtacccgccttgactaagccctgccagcgcgcggccatcggcatctttacggacattaaaacgcttgctaatcagcgggataatatcgttcatcagttcgcgatctgccgctttagcattcagcggataaaagactttacgtctttcctgaggcacgaaatcttcgggaataatgcccttcgcatcggtttctgtatccgggatcaccaccagcatcggtttaattttcccttcagcaagcaggttatccatgatttgcgggatacgcccctgatcgatagcggaacgtccggtatcaccaaagccgtgatagaaatagagcactggcaaaggctcgcccatgccggtgtatcctggcggggtccagacatacatctgacgttcagattgcaatgcgttggagtggtaagttatggcgatcaaatcaccatgcgcaacagaacgcgtatccagataactgcctggcaccagaatcatactggagttaacctggcgctgaggattagtcattgcggtgcctgtatcaatgctgcgtacaccatcaacattgaaaaaatactcgtacaggttgcctttcaggataggtgtgcgccagctccagactcctgcttcgtctttggtcatcgggtgaatattgtccggaaccggaacacccaccactacagagacattttttgccccaggggcaaagtagcgaaaggtcacgctgttatcggcattgacctgagtcacatactgtttcaccgggatagtgggtgccgggctggctggcatatccgctgctatggcccactgagcagaaataccgctggcaatagccagcgttaaagcagcaatttttatattcatcgtaatattcctttcattaagttccattaccaccagatttcagcctgggcaccgacagcaaactggtcgtctttattgtcttcaaaggtgaagccatccagttcgttttccagggctttgatatacgtggcgtagaaacgaatttccggacggctggtcaacatactggtattgactttaaaggtatggaagagcgtggttttataaccagactcattaaatttattactattcgcatctttgttttgctgggtgaaatagcccagttcaacacctgtctggttatattggtcccaaatataggccgggcgaacaaccgcacgaatagattcgaaatcagagtgggcgcctgtttcgtagctatatatatcgttaccgaaggagtaaacaatcgcgttagctacaatgaaatgatcgccaatataggcttcgccctggctagtcagacgtaccgctgttccgccggtgtgatcaccataataacgaccattaaaggtggtaaatggacttgcgccagcataacggccaaagttactggcgatagagttattcgcgaccaggaaggagaattcgttgaagccacctttatcaaatttctgcgttaaagatgtgccaaacatccaggtatctttccagtcataatacccgttattatcctgattatctttttcgcttgcgctttcgtttgccgtgacataacgaccacttaccattaaggtggctttatcccataacgggatatctttatagcgtaaatcaatggtattggtattaatctgctgtttgttttgcaggctgcgatcgtaatcatcgacatcttcgcgaaccagcgcgatatcaattttacccggaccgactttccagttttccagacctacacccgctgcggcatcagtacgctgcgttttccagtcaagcatctggatttcaattttcggcgcaccgtgtttacccacccagaaatcagcctctggcgcaaagggcaggaaacctttggtggtaacgtacatatcggagaactgcatatagttctcgccaccggcgttatcgccaaaccagccggtagagtactgctgaccaacgttaccatccatcatcacaacggcatcaacccgtttgccgttttcgttgtagacacgttgttttaactgcaaatcaaaccagccggagtattcgttaccaaagcggcccagagaaccaatcgcccaacttttaggactaccatgagaggcggtcccccaaccagaacggtaatagccgttgtaactaaagccaatttcatctttcacaaatttactgaaatctttcagagtcatggaagaataaatgctgcctgtctcactggcatttttctcttcatttttgaccagtacagcatcaggttttgcggcactactggtcgggaacggattggcggcatacccttgatcattcgtacttacgctacgattcaccgtcgctggcgtatactttttcttctcttcatctttatactttttgagttcgctttgcgtttctcttaacgccttttctaataactcaaggcgttgttccaccgttaaactttcagccaaactttgtgcagaaaaggctaacggtgccattaataagatggcagaggtaataagatttcgtctaaacataatatccctttatggtgcaaagaaagaattaacgcatcgcatccagactgttctgaatgcgacgataattaaggtgctttaatggttattttttttaaactcagcccccgcgtcttgatcacctctgcataccatccgaagcttttcttgcgtgttcttgtgaggcttccttcgccattatcatcacgatccacataaataaagccgtagcgcttagacatttgactatgagatgcactgactaaatcaattggcccccaactggtgtaccccataatatccacaccatcggcaatcgcttcatttacctgtaccaggtgatcgtttaaataggcaattcgataatcgtcctgtatgctaccatccgcttcaacgctgtcttttgcgcctaatccgttctcgacaataaataacggtttttgataacgatcccaaagcgtatttaacagaacccgtaatccaaccggatcaatttgccacccccactcactacttttcagatgcggattggggatcatattcagtatgttgccctgcgcatttttattaatgctttcgtcgtgggaaacacaaccagtcatgtaataactaaaagagatgaaatcgacggtatgttttaaatcttctgcgtcactttcagtcatctcaatggtgatattgtggtcgcggaagaaacgctgcatatagccgggatactggccacgcgcctgaacatcaccaaagaacatccagcgccggttctcttccatggcctgcaacatatcctgtggctggcaggtgagggggtaaaccagcccaccgagaagcatattgccgattttcgcttcggggagcaggctatgacaggctttaactgcccgcgcactggcaaccagttgatggtggatagcctgataaacttccgcctcgccactctcttctgccagccccacgcccgtgaatggcgcgtgtaagctcatgttgatttcattaaacgtcagccataacgccactttatgttggtagcgagtaaagaccgtgcgggcgtaatgctcgaagtgatcgatgaccgctcgattagcccaaccgccgtagtttttcaccagcccatatggcatttcgtaatgggataacgttaccagcggcttgatccccgcctgcgccatttcatcaaacagccgatcgtaaaacgctaaccccgcttcattcggttcgacttcgtcgccctgagggaaaattcgcgcccaggcaatggaaatacgcagacaggtgaagcccatctcggcaaataacgcgatatcttccgggtaacggtgataaaaatcgatggcgacatctttgatattctctttccccaggatgcgcggttccatttttcccattacgccatgaggctgtaaatcactggtgctgatccctttgccatcttcctgccaggcaccttccacctgattggcagctgttgcgccaccccaaagaaatgtttctggaaatgctttcataattaactccttttatcgttagcgaatgatggataacagcggttcacctgcgcttatctgcgccgtgccgtggggtaatacgtccgtaaaatcatcgctattactgattaataccggcgtcgtcagatcaaatccggcctcgcgaatagcagggatatcaaaagaaatcagccgatcgcctgtattgaccttgtcacccacgttgacgtgagcggaaaagaatttgccgtccagttttacggtgtcgataccgacatgaatcaggatctccacaccatcatcactctcaatgccaatggcgtgtaatgtggcgaacaagctagcaattcgacccgcaaccggagaacgcacttcaccaacgctgggcagaatggcaatacctttacccaacaggccactggcaaacgtggtatcagcgacgtgaatgagcggcacaatctctcccgtcatcggactacagataccgccctgctcaggtggtgtaataacctctggtgttttctcttgcggggcaccctgcgctggctgacgtttagcggtgatgaaatgaagcatcaccgtaccgacaaatgcgcaaccgatggcaatgacaccgccaataacgctggcccagacggtgaaatcaattcccgtactcgggatggtttgcatgaaggtgaaaatacttggcaaaccaaaggagtagactttcgtttgcgcgtagccaataatggtggcccccaaagccccactgatacaggcgataacaaaggggtacttacgcggcaggttgacgccatataccgctggttcggtgataccaaacagactcgtcaacgccgcacttcccgccaccacttttttctgcgcatcgcgttcgcagaggaagacgccgagcgccgccccgacctgcgccataatggcgggcattaacagcgggatcatggtgtcgtagcccagcacggtgaagttattgatacacagcggcaccaggccccagtgcagtccgaacatgacgaagatttgccagaagccgcccattaccgcgcccgcaaatgcaggaaccgcctgataaagccagagataaccggcggcaatcagttcgcttatccaggtacttagcggccccaccagcagaaaggtgacgggtgtgataaccatcagacatagcaatggtgtgaagaaatttttgattgcgctcggtaaccacgcattaagtcggcgttccagaatgctgcacaaccaggcagaaaaaataatgggaataacgctactgctgtaattcaacaatgtgaccggaatacccaggaaatccagccccagcgcatccgctttttgcccgttctcgaaagcagtcagaattaatggatgcactaacgctccaccaatcaccatggcagtaaatggattaccgccgaagcgtttccccgcggtgtatcccaggattatcgggaagaaccaaaacaaggcatcactggcgctgaataaaattaaataagtaccactttgttcggtcgtccactgaaaagtgagcgccagagccagcatacctttcaagatcccggttgccgccatcaaaccgatcagaggcgtaaaaataccactaataacataaacaaagcggtttagcagattacctttatcatcattttccggtgcctgttgcgctttttcgtcaaggcctgccacactgttaaccgccaggaagacatcggccacatggttacctatgaccacctgaaactggccaccgctttccaccaccataataataccgggggtctttttcagtacctctgcttgcgctttgctttcatcctttaatttaaaacgtaatcgcgttgcgcaatgcatcagactcacaatgttatctgcgcccccgactcctgcgactatttttctggctaactccgtcataacttgccctctaccgctttgcggcaaaactccaaaaaaaaacctgaaaaaaacggcctgacgtgaatcaagcaatttttttcaggttttgcccgcttagtgcggtaacaatcctttactcagtaataatatttcagtgttctttgcgcacgcgctctatatttatggctaaaaacataatctctgcgggactaattttacgttgatactgcaaaccaataaaaatggcgatccgttccgcacattgccatgcttgcgggtaattttgttttactgcttgttgtaaactttcatcactatcgttaatactagcatgttcaagaatacgccaggataaaaacttcagatgtgtaaccagtcgctgataactcaagctttcttcctggtaattaaggctgaactgaaattttattaattgcagcatttcgcgcattaactgcgtgacacctgcaacatcctccatatttccgctcatttgggcactgaccagatgcatggcaataaagcccacttcatctttcggtaactgcacgcccaaccgtttatcaataatggttaacgcttcttcccctagctggaactctttcgggtaaagccgctggatatcccacagcaacgggttgggcagcaacacgttttgctgaaagcgtttaatcgcaaactggcaatggtcagttaggctgatataaatactgtcctgtaattttcccaagcgctcctgcgctaaagagataatacgatcacaggttgccatcacctcaagaggaatatgacttaagagttcgcttaatcgcccgttcagttcatgactgctcaaggcatactctttttctattccactactgttaattctttcgccagcgcgtttttgaaagccaattccgcgccccatgacgactttttcccgctgttgatcatcaataaccaccacaacattattgttgagaattttggtgatttgcatgttcatagcaaggaccttttttataaacaaaaaaacccgacttcaccagtattctctggttatgtcaggttttgcctgcgaatgcagtaacaatccagtcatttattaatggtttttataacgaacatccaggttcggaaattaatttaattgcgtgcagagaaaatagcaatgcgctattgataaaaatatgaccatgctcgcagttattaactttgtgtaattttaggaatttataaagttatatataacaaatcccaataattaagttattgggatttgtctggtgaattatttgtcgctatctttccccgccagcagtttatccagctcatcgccaccgacgtgacggaaatcctgccccttcacgtagtagaagataaactcacaaatattctggcagcggtcgccaatacgttcgatagaacgcgcgcagaacagcgcagtaagtacgctcggaatggtacggctatcttccatcatgtaggtcatcagttgacgaacaataccttcgtattcctgatcgacttttttatcttcacgataaatacgtaccgcttcgtcaatgtccatccgcgcgaacgcgtccagcacgtcgtgcagcatctggatggtatgacggcccaggctctccagacttaccagcaacggctgatgctgctgggagaatttctccagcgcagtacggcagattttgtccgccacgtcgccaatacgctccagctcggcaatggttttactgatcaccataaccagtcgcaggtcgctcgccgtcggctgacgtttggcgataatgcgcacgcaggcttcatcgatcgccacttccatcatgttgacgttcttgtcgccttcgatgacgcgcttcgccagatcgctgtcctggttatgcatcgcggtgattgcatcagaaagctgctgctccaccatgccgcccatggtcatcacctgcgtgcggatactttccagttcggcgttgaactggccggaaatatgtttattaagattgagactgtccataacgcactcctgaatcaaccgtaacgaccggtgatgtagtcttctgtttgtttcttcgctggcttggtgaacagatcgtccgtgttgctgaactcaatcaattcgcccaggtacataaacgccgtgtggtcggaacaacgcgcagcctgctgcatgttgtgggtgacgatcaccacggtgtaatcctgcttcagttcggtgatcagctcttcaatacgcccggtagagatagggtcgagcgcgctacacggttcgtcgagcagcagcacttccgggcgaatggcgataccacgcgcaatacacagacgctgttgctgaccaccagagagagagtaaccgctctggtgcaatttatctttggtttcgttccacaatgcggctttggtcaatgcccactgcacgcgctcgtccatgtcggcacgggagagcttctcaaacagacgaacgccaaaagcgatgttgtcgtagatggacatcggaaacggcgtcggtttctggaacaccatgcccactttcgcacgcagcagtgcgatatcctgagagttggtcaggatgttgtcgccatcaagcagaatttcaccttccgcacgctgctccgggtacagttcaaacattttgttgaaggtacgcagcagcgtgcttttaccgcagccggacggcccgataaacgccgttacctggtttttagcgatatccaggttgatgtttttcagggcatggaatttgccgtagtagaagttcaaattacgaacctgaattttactcggggcagtttcaaccatactcattgcaatcttttcctcatcgtgcctgatgcacttcgctaatcaggcttaccgtaggccggatcaggcgttcacgccgcatccggcaaagtgttaaccgtgtacagagtcaaaaaggcgctcggtcggtcccctcgcccctctggggagagggttagggtgaggggaaaaccgtgtcagcaatatcaaccgtgtttattcttcgcaaaaacaacgcgcgccagaatgttcagcagcagtacgcacagggtaatgatcaataccccggcccaggccaattgctgccattccgcaaacgggctcatcgcaaacttaaagatcgtcaccggcaggttggcgatcggctgcatcatgtccgtgctccagaactggttggagagcgcggtaaacagcagcggcgcggtttcaccagcaatacgggcaatcgccagcaggataccggtcataatcccggacacgctcgctttcagcgtaatcgcagagatcatcttccacttcggtgtacccagcgcataagccgcttcacgcaggctgtacggcaccagtttcagcatgttctcggtggtgcggataacaatcggcacctgcaacaacgccagggcaatcacgcccgcccagccggagaagtgctccatctgcgccaccacaatggtgtaaacaaacagaccaaccacaatgctcggcgcagagagcagaatgtcgttaatgaagcgaatcacttctgccagccaggatttacgaccatattccgccagataaatccccgccataatgcccagcggcgtaccgaataccgtggcccacaaaattaacagcccgctacccgccagagcgttcgccagaccaccaccttccgtattgggcggcggcgtcatttcagtgaacagcgccaggctcataccgtcgataccgcgagtgatggtggacattaaaatccagatcagccagaacaggccgaaggccatcgtcgccatgctgagcgtcagcgcaatacggtttttgaggcggcgacgcgcctgcattttgcggcgagattcagccagcgccgcagtggtttgcatttcaaccatagccattagcgtgccccctcattcttagccaggcgcataatcataaacttgcttgcggcgaggacgatgaaggtaatcacaaacaggatcaggcccagttccatcagtgcggcaacgtgcagaccggattccgcttccgcaaattcgttcgccagcgcagaggtgatactgttgcccggcatatacaggctggcgctgtcgagctggtaggtgttaccgatgataaaggtcaccgccatggtttcaccgagcgcgcggcccagccccagcatgatgccgccgataacaccatttttggtgaacggaagaacgatacgccagataacttcccaggtggtgcagccaataccgtaggcgctctctttcatcatcaccggggtttgttcgaacacatcacgcattaccgccgcaatgtacggaataatcatgatggcgaggatcacgcctgccgcgaggataccgataccaaatgcggggccagagaacagcgcgccaacaatcgggatattgctcatgatattgccgaccggctcctgaaagtaaacggcgaacagcggcgcaaagataaacaggccccacatgccgtaaacgatacttggaatggctgccagcagctcaatggcgatacccagcgggcgtttcagccagccaggcgcaagctcagtcaggaacagggcgataccgaaactcaccgggacggcgatcagcagcgcgataaagctagtcaccaacgtaccgtagatcggcaccagcgccccgtagatatcgttcggtgcatcccactctttggtccataggaaagccagaccaaatttctgaatgctcggccaggaggagatgatcagagagacaataatgccacccaacatcaatagcacaatcagcgccgccagttttaccagcacgctgaaaattatgtcgccctttttacccggtgggttaaaagcaggcttggttgcagccataagttactcttcagttaaacgcgtttacaaagtcattttgtaatgccggatgcggcgtaaaacaccgtacccggcctggagttttattagtacagcggcttaccgctactgtctttaatattggtcttccacgcagcgcgaacctgttcaactacactatccggcaggctggcgtaatccaggtcgttcgcctgtttagccccggttttgtacgcccagtcgaagaatttcagcacttctgtgccttgttctggtttcttctgatctttgtggatcagaatgaacgtggtagaggtaataggccatgcatcttcgcctttctggttggtcagatcctgagcgaaggttttgctccagtctgcaccttttgctgcattagcgaagttttcttcggtcggactaaccggtttaccatcagcggagatcagtttggtgtacgccaggttgttctgcttcgcgtaagcatattcaacataaccaattgcacccggcagacgctgaacgaacgcggcgataccgtcgttacctttaccgcccagaccgatcggccattttacggtagagccagtaccaacgttgtttttccactcttcgttcactttcgccaggtagctggtgaagacgaaggaagtcccggagccatctgcgcggcgtactacagcaatgttttgactaggcagtttcagacccggattcagtttggcgatggcttcatcatcccacttcttgattttgcccaggtagatgtcgccgagggttttaccatccagcaccagttcgccagacttcagccctggaatgttaaccgccagcaccacgccgccaatcacggtcgggaactggaacagaccttcctgagccagtttttcgtcagacagcggcgcgtcagaggcaccaaaatcaacggtattagcgataatctgttttacgccaccggaagaaccgataccctggtagttaactttattaccggtttctttctggtaagtgtcagcccatttggcatacaccggcgcagggaaggttgcacctgcacctgtcaggcttgcttctgcaaacacagagaaagcactcatgcttaaggtcgcggcgacaacagttgcgacggtggtacgcataactttcataatgtctcctgggaggattcataaagcattgtttgttggctacgagaagcaaaataggacaaacaggtgacagttatatgtaaggaatatgacagttttatgacagagagataaagtcttcagtctgatttaaataagcgttgatattcagtcaattacaaacattaataacgaagagatgacagaaaaattttcattctgtgacagagaaaaagtagccgaagatgacggtttgtcacatggagttggcaggatgtttgattaaaaacataacaggaagaaaaatgccccgcttacgcagggcatccatttattactcaaccgtaacgctttttgccaggttacgcggctggtcaacgtcggtgcctttgatcagcgcgacatggtaagccagcagctgcagcggaacggtgtagaagatcggtgcaatcacctcttccacatgcggcatctcgatgatgtgcatgttatcgctacttacaaaacccgcatcctgatcggcgaagacatacaactgaccgccacgcgcgcgaacttcttcaatgttggatttcagtttttccagcaattcgttgttcggtgcaacaacaataaccggcatatcggcatcaattagcgccagcggaccgtgtttcagttcgccagcagcgtaggcttcagcgtgaatgtaagagatctctttcaacttcaatgcgccttccagcgcgattgggtactgatcgccacggcccaggaacagcgcgtgatgtttgtcagagaaatcttctgccagcgcttcaatgcgtttgtcctgagacagcatctgctcaatacggctcggcagcgcctgcagaccatgcacgatgtcatgttcaatggaggcatccagacctttcaggcgagacagcttcgccaccagcatcaacagcacagttaactgagtggtgaatgctttagtggatgccacgccgatttctgtacccgcgttggtcattagcgccagatcggattcgcgcaccagagaagaacccggaacgttacagattgccagactaccaaggtaacccagctctttgctcagacgcaggccagccagggtatccgcggtttcgccagactgactcaaggtgatcatcaggctgttacgacgcacggcagatttgcgatagcggaattcagaggcgatttcgacgtcgcacggaatacctgctaggctttcaaaccagtagcgggaaaccataccggagttataagaagtaccacaggcgaggatctgaatatgctcaaccttgctcagcagttcgtcggcgttcggtcccagctcgcttaaatcaacctgaccgtggctgatgcgtccggtaagggtgtttttgatcgcgttcggctgttcgtagatctctttctgcatgtagtgacggtaaatgcctttatcgcccgcgtcatattgcagattggattcgatatcctgacgttttacttccgcgccagttttatcgaagatgtttacgctacggcgagtgatttccgcaatatcgccctcttcaaggaagataaagcgacgggtcaccggcaacagcgccagctggtcagaagcgataaagttttcgcccatccccaggccaatcaccagcggactaccagaacgtgccgccagcagggtatccgggtgacgggagtccatgatcactgtaccgtacgcaccacgcagctgcgggatagcacgcagaacggcctcacgcagagtcccgccttgtttcagctcccagttcaccagatgggcaatcacttcggtgtcggtttcagaaacgaaggtatagccacgcgcttttagctcttcacgcagcggttcatggttttcgatgatgccgttatgcaccaccacaatgtgttcagaaacatgcggatgcgcattcacttcactaggttcaccgtgggtcgcccagcgagtgtgagcaataccagtgccgccatgcagaggatgttcttccgctgcctgtgccagcatctggactttaccgaggcgacgcaggcgggtcatatgaccttctgcatcaacaacggccagaccggcagagtcatatccgcggtattccagacgacgtaaaccttcaagaaggatttctgctacatcacgttgcgcgatcgcgccaacaattccacacatagtttttgattccgatttatatcgttgtcggtcaacctgtatgcccgttttttcgggcgccccgagccttgtagagagtggggttatttttatagttactgcttgtgggagggagattatgttatctcctcatcccatgtgaccgggttagccggccagaatcactttttctttaccggacgacgccagccttctttctgagtctgcggcacacggctgatagctaatgcattttcgccgacattacgcgtcacagttgtacccgcagcaatggtcgcgcctttgcctactgttaccggggccaccagctgagtgtcggaaccaacaaacacatcgtcgccgataatggtcttaaatttattcgcaccatcgtagttgcaggtaatggttcccgcgccgatgttaacgttatcgccaatttccgcatcgcccaggtaagtcagatgaccagctttgctgcctttacccagacgcgcttttttcatctcaacgaagttaccgacgtgagcaccttccagcaactcagcaccaggacgcaaacgggcaaacgggccaatggtacaggccgctgccagattcgcatcttccacaacggtatacggactgatttcgcaatcatcgccaatcacgctgtttttaatcacgcaaccggtgccaattttcacgcgatgaccgagagtcacgttgccctcgatgataacgttagtatcaatttcaacatcgcgcccgtgagttagcgtaccacgcagatcaaaacgcgctggatcgcgcagcataacgcctgctaacagcagtttttcagcctgttcggactgataaacacgctccagacgggagagttgcaggcggttattcacgccttctacttcgcttaaacgttgcggatgaacggcgacgatttcacgcccttcctgatacgccagcgcaataatgtcggtgatgtagtattcgccctgagcattattgttggtcagcttcgccagccagcgtttcatatctgcgccgttggcaatcagaatgccggtgttgatctcctgaatctgacgctgctcgtcggtggcatctttgtgctcaacaatgccggtaactttgccgttttcacgggtgatacgtccataaccggtcggatcatccagtttcaccgtcagcagaccaatgccaccctgcggtttagcatcacgcagacgctggagtgtttcgacagagatcagcggcacgtcgccgtagagcattaaaatgtcttcatcatcggcaaagaaaggtgcggcctgctgcattgcatgacccgtacccagctgctctgcctgaagcacccagttaaggttgtcgtctttcagcgcctgttttagcagatcgccgccgtgaccgtacaccaggtgaacgtgcgctgcgcctaattcattcgcagcatcaatgacatgctgaaccatcgctttcccggcaagggtatgcagcactttcggaagatcggaatacatgcgcgtgcctttgcctgcggcaaggatcactacgctcatagcattattcaacatacgcgtcctgactgtaatttgagaacgaatttaaaccgcttcaccttgaaaaaactacatttttttcatcgtgaaatggacagaggataaattgttcaataacggattatccccgctgacgaaagcgccattttcgaccatcgtcacgccttttgtctgcagaaaattaaggcagtaccttaatttaagcgtcaggtggatgtttttgctcttatttcgatcaatgaataaacaggaaaacaggggggttttatatcagcaggatctatgtgaacgctattcaggacgggtcacacgcgcaaaaaaaagccagcctgtttccagactggcttttgtgcttttcaagccggtgttacatcgcttttttggtcaactcgataacgcgcagctgcgcgatcgctttggccagttccgcagacgcctgagcgtaatctacgtcgccgtgagagctgctaatgtgctcttcagccttacgtttcgcttccatggctcgcgcttcgtcgagatcctggccgcgaattgcggtgtcggccagaacggtcacgttgccaggctgcacttcaagaatgccgccagacagatagataaactcttcgtgaccgtgctgtttcacgatgcgaatcataccaggcttaatggcggtgagcagcggtgcgtggccagggtagatccccagttcaccttcgctacccgttacctggattttctcgaccagaccagagaacatttgttgctctgcgctgacgacgtccaggtggtaagtcattgccatatcaccctccgattaaggcgttaaagttttttggctttttccacagcttcttcgatggaaccgaccatgtagaacgcctgctccggcaggtgatcgtattcgccttccatgatgcctttaaagccacggatggtgtctttcagggagacgtatttacccggagaaccggtgaatacttctgccacgaagaacggctgggacaggaagcgctggatcttacgagcacgcgctaccaccagtttgtcttcttcagacagttcatccatacccaggatggcgatgatgtctttcagttcctgataacgttgcaggatggactgaacgccacgcgcggtgtcgtagtgttcctgaccaaccaccagcgggtccagctgacggctggtggagtccagcgggtcaacggccgggtagatacccagagacgcgatctgacggctcagtaccacggttgcgtcaaggtgcgcaaaggtggttgccggagacgggtcagtcaagtcatccgcaggtacgtatactgcctgtacggaggtgatagaaccagttttggtggaggtgatacgttcctgcagaacgcccatctcttccgccagggtcggctgataacctaccgcactaggcatacggcccagcagtgcggatacttccgtaccggccagggtgtaacgatagatgttgtcaacgaacagcagaacgtcacgaccttcgtcacggaatttctcagccatggtcagaccggtcagagcaacgcgcagacggtttcccggcggctcgttcatctggccatacaccagggatactttgtcgataacgttggagtcggtcatttcgtggtagaagtcgttaccctcacgagtacgttcacctacgcccgcaaacacagagtaaccggagtgctcgatcgcgatgttacgaatgagctccatcatgtttacggttttacctacacccgcaccaccgaacagaccaactttaccgcccttagcgaacggacacatcaggtcgataactttgataccggtttccagcagttcctgagagttactcagctcttcgtaggaaggtgctgcgcggtgaatcgcccaacgctcttcttcaccgatctcgcctttcatgtcgaccggttcacccagtacgttcatgatacggcccagagtcgctttacctaccgggacttcaatcgggtgttcgaggtcttttacatccagaccgcgacgcagaccgtcggaggaacccattgcgatggtacgtacgataccgccgccgagctgctgctgaacttccagcaccagacgctcattaccattttgcacctcaagagcatcgtacacgcgcggtacggcatcctgagggaattcgacgtcaactacggcgccgattacctggacaatctttccagtagccatcttaaatcctctacgaaataacctgtttaaaccgcggcggccccgctgacgatctcggtgagttcctgagtaatgctggcctgacgagctttgttgtataccaactgcagctctttaatcaggctgccgccattgtcggtcgcggctttcatcgccaccatacgggcggcctgctcgctggccaggttttcaaccacgccctgataaacctgagattcgacataacgacgcagcagggtatccagcaacgccttcggatcgggttcgtacaggtaatcccaggatttatgtttcagatcatcatcatcacttgccggtaacggcagcagctggctgatggtcggaacctgagacatggtgttaataaatttgttgctgacaatgtaaagcttgtccagacggccttcgtcgtaggcctgcaacatcacttttaccggaccgatcagttcggacagggaagggttatcccccatgccggtgacctgggcaacaacattgccgcccacggagttgaagaagctcacgcctttgctgccgatcattgcgaggtcgcattgaacgcctttgtcggtccaggtcttcatttccgccagcagttttttgaacaggttaatgttcaaaccaccgcacaaaccacggtcggtgctcaccaccaggtagcccacgcgtttaacgtcgcggtcttccaggtaagggtgcttatattccagattaccgtgtgcaaggtgaccaatcactttgcgcatggtttctgcataaggacggctggccgccatgcgatcctggcttttacgcattttggaagcggcgaccatctccatcgctttagtgatcttttgcgtgttctggacgcttgcgatcttactacgtatctcttttgcgccggccatgagcttctcctcaatgccttgcggcctgccctaaggcaagccgccagacgttaccaggattgggttgctttgaaggaatcgaggatgcctttcagcttgccttcgatttcgtcgttgtagccaccggtctggttgatctcttgcatcaacggagcgtgatcacggtcgacgtaagccagcagagcggcttcgaagctgccaattttgctcagttcaacatccgccaggtaaccacgttctgctgcgaacagaaccagagactgctgcgcaacggacatcggcgcatactgtttctgtttcagcagttcggtcactttctgaccgtggtcaagctgcttacgtgttgcatcgtcaaggtcggatgcaaactgagagaacgctgccagttcacgatactgtgccagagcggtacggataccaccggacagttttttcatgatcttggtctgtgctgcaccaccaacacgggatacggaaatacccgggttaaccgcaggacgaataccggcgttgaacaggttggtttccaggaagatctgaccatcggtaatggagattacgttggtcggaacgaacgcagaaacgtcacccgcctgagtttcgataatcggcagtgcggtcagagaaccggttttccctttcacttcacctttggtgaaggcttcaacgtattcggcgttaacacgtgcagcacgctccagcagacgagagtggaggtagaaaacgtcgcccgggaatgcttcacgtcctggcggacgacggagcagcagggagatctgacggtaagcaacagcctgtttagacaggtcatcgtaaatgatcagcgcatcttcaccgcggtcacggaagtattcgcccattgcgcaaccggcatacggtgccaggtattgcagtgcagcggattcagacgcggttgctaccacaacgatggtgttagccagtgcgccgtgctcttccagtttacgtaccacgttagaaatggtggacgctttctggccgatagcgacatagatacatttgataccggaatcgcgctggttgatgatggcatcgatagccagtgcggttttacctgtctgacggtcaccgatgatcaattcacgctgaccacgaccgattgggatcatggagtcaacggctttataaccggtctgtaccggctgatctacggactgacgttcgataacgcccggagcgattgcttctacagcagagaagccgtcgtgatccagcggacctttaccgtcgattggtgcacccagagtgttaaccacacggcccagcaggccacggccaaccggaacttccaggatacggccagtacacttaactttcatgccttcggcaaggtcagcgtacggacccataacaaccgcacctacagagtcgcgctcgaggttcagtgcgatagcgtaacggttacccggcagggagatcatttcaccctgcatacaatcggccaggccgtgaatgcggataacaccgtcacttacagaaacaatagtaccttcgttgtgagcttcactcacaacattgaactgagcaatgcgctgcttgatcagttcgctgatttcggtggaattcagttgcatgctccagtccccttaagactgcaagacgtctgcaaggcgctcaagacgaccgcgtacgctgccatcaatgaccatatcacccgctcggatgataacgcctgccattacagacttatcgattttgcaattcagcttaactttgcgactcagacgtttttccatcgcagcagaaattttcgcgagctgttgttcactcagtgcggcagcggaaatgacgtctacctcagcggtagcctcactcacggcacgcaggtgaataaactgctccagaacatccgggagcgcgttaagacgaccattttcagccataacccgaatcaggttctgaccgttttcgtccagttgctcaccacaaactgcgataaagctctcggcgagcgtttctggcgcaagcgcgccagagagaagctctgccatttgttcgtttttggttacctcggcggcaaacgccagcatgtcctgccagcgttctacactttggtgttcgacggcaaagtcaaaagctgctttggcgtaggggcgagctaccgtaataaattcagacatcagcccctccctccttacagttcagcgacaagtttatccacgatgtcgctgttagcagcttcatccacggaacgttcgatgatcttctcggcgccagcaacagccaggatagcaacttgcttacgcagctcttcacgggcacgtttacgctcggcttcaatttccgcctgcgcctgggccacgattttagtacgttcctgttctgcctcagctttcgcttcgtccagaatctggctgcggcgtttgttcgcctgctcgatgattacctgggcttccgctttcgcttttttcagctggtcggtcgcgctggcctttgcaaggtcaaggtccttatgtgctcgttctgcggaagcaaggccgtcagcaatttctttttgacgtttttcgatggctgccattaatggcggccatacgtacttcatgcagaacagaacgaacaggacaaacgcgatggcctggccgaggattgttgcgttaagattcacagcacaatgcctctatttagttaacgttctgatattgctctttaaataaaagcaacgcttattacgcgacagcgaacatcacgtacagacccagacctacagcgatcatcgggatagcatccaccagacccataacgataaagaactgagtacgcagcagaggaatcagatcaggttgacgcgctgcgccttccaggaatttacccccgaggatgccgataccgatcgcagcaccgattgccgccagacccatcatcacagcggcagccatgtacagcagatccatattcaggttttccatgacagtctccagtttgtttcagttaaaacgtagtagtgttggtaaattaatgttcttcagacgccatgctcagatagacgatcgtcagaaccatgaagatgaaggcttgcagcgtaatgatcaggatgtggaaaatggcccacggcacattcaggatccactgactccaccacggcaacagaccagcaatcagaatgaaaatcagctcaccggcatacatgttaccgaacagtcgcaaaccgagactaactggtttggacagcaggcttaccccttcaaggattaagttgacaggaatgaacgcccagtgattgaacggctgcagcgtcaactctttcgtgaagccgccgatgcctttcattttgatgctgtagaacagaatcaggataaatacgcccagtgccatagacagcgttacgttcacgtccgcagacggaaccacacgcagtgcaggcagacccagtacatgttcagcaatgtacggcagcaggtcgataggcagtaaatccatcaggttcatcaggaatacccagacgaagatcgtcagggccagcggagcaatcagcttgcttttgccatggtacatgtctttcacgctaccattaacaaagccgatcaccagctcaatcgcggtctgaaacttacctggcacaccgctggtcgcctttttggctacgctacggaataaaaccaggaacaacagacccagcaccacgctgaagaacatggagtcaatattgattgtccagaaggtggctggggggttttgtggatccaccaggctgaatgtacgcaggtccagctgaaggttattcaggtggtgtcctatgtaatcctgcggcgtcatattttcactagccatgatgccttttaccctttgttgttaattacagccggtgccagtatctgaaccaccagcaccaaaacccacgtaacgatcagcggcaagaataccgcctttaaaaccgccaacgccaccaccagtaacaccaacatcgccagaactttgaaagcttcgccaaatgcgaatgtccaggccacccggcctttcgctggtgtatgcgcctggtgacgccaggcaaatatcataaacaaaacgttaggcagaaagactgccaggcccccgcttattgcagagacgccccagaaggggtctttgaggctgaacagcaatccacttgctatcaccaccagtaactgaacgagcagaagcttccgagcaacgtttcgactcacgaggctcacagacatcacgtttttcactcctgctcccttcgaggtatgccgcgtgtcgtataaaactttctttaaggcttagagtcaagcatcaaaaagcggtcaaattatacggtgcgcccccgtgatttcaaacaataagtagccaaaaggtgaataaatgtttaaatatttttccagtgcatacaattgcgacttttctgctaaccctgttcgatcatgaaaaactgtaaataacgcgtaaacactggtgataaagcgtgcttcagatcacatattgcgcatgttcgcgcacagcatatttatttacttggcaaatgatgcctttgcaagtttatgatatttcagtctaaaaacagatactgttttaataaatgacatttacacaacaaaaaccacccattgacatttttaataatgttttaacagccaatgatggttcttagcgccgatttttagcagactgatattttcactaatgacttattttctgcttaccaaaaaaagccacgttatcttgttgatgcaaaagagtgaacgtggcgttaaatgtaaccagttatatcagtagaaaacctggttgttgttaacagtctaaccggtcaattttttatgatttttttgataaaaattaaattttatttgctttaatcaccaccagatgacgttcgccatccagggctggaacctgaagtttaaccacactttcgacctgatattcttcgggcaacaaagcgatttcatcttccggcatttgccctttcagcgcgtagaaacggccttgctcaccaggaagatggtggcaccagctcaccatatcgttcagagaggcaaaagcgcggctaattacgccatcaaatggcggctcactaggaaactcttctaccctgctctgtactggttcaatattctccagtttaagctcatgttgcacctgacgaaggaaacgcacgcgtttaccaaggctatccaacagagtgaaatgggcttcaggacgcacgatagagagtggaatgcctggcagtcctggtccggtgccgacatcgataaaccgttcaccttgcagatacggtgccaccacaatgctatcgagaatatggcgtaccagcatctcattaggatcgcggacgctagtcaggttgtacgctttgttccatttatgcagcatattcacgtaggcaataagctggtttttctggtgatcggtaaggctaatacctgcgtctttcagcagtaaggagagtttgttgagcacggtgattacctgttcttgatgcgttgcctggtaagcgggtgcttaccaggcatttttaatgcgttatgcgctacgacgcagcataccctgttttttcagccacaccagcagaatggagatggccgcaggcgtgacgccagaaatacggctagcttggccgatagaggctggtttgtgatcgttaagtttggcgatcacttcgttagaaagaccggatacctggcggtaatccagtgtcgcgggtagcagggtgttctcgttacgcagctgcttttcgatctcatcttgctggcgcgcgatataaccttcgtatttaacctgaatctcaacctgttccgccgcctgttcgtctgtcaacgcaggggcaaacggcgtcagcgtggttaatttttcataagtcatttccggacgacgcagcagatcttcaccactggcttcacgggaaagcggcgcagtcaggtgagcattcacttcggctgcagcttccgcgctcggggttacccaggtgcttttcagacgctgacgctcacgctcgatattctcaagtttctcgttaaagcgcgcccaacgttcgtcatccaccaggcccagttcacgaccgatttcagtcaaacgcagatccgcattatcttcgcgtagcatcagacgatattctgcgcggctagtaaacatacgatacggttctttggttcctaaagtgcacaggtcatcaactagtacgccgagatacgcctgagaacgtgccggagcccaaccttctttgtcagcagacagacgggcagcgttaagaccggccagcaaaccttgcgcagcggcttcttcgtaaccggtagtgccgttaatctgaccagcaaagaacagcccctggataaacttgctctccagcgtcggtttcaggtcgcgaggatcgaagaagtcatactcaatggcataacccggacgcacgatcttcgcgttttccatcccctgcatagagcggacgatttgcatctgcacatcgaacggcaggctggtggagataccgttcggataaatttcattagaggtcagtccttccggttcaaggaagatctgatgctgatttctgtcggcgaagcgcatgactttgtcttcgatgctcgggcagtagcgtgggccgacaccttcgatcacccctgcgtacattgggctacgatcgaggttactgcggatcacatcatgggttttctcgttggtatgagtgatataacacggcacctgctggggatgctgggacgcattgcccataaagctgaataccggcattgggttatcgccatgctgttgcgccagtacgctaaagtcgatggttcgagcatcaatacgcggtggtgtcccggttttcagacgaccaacgcgcagcggcagttcacgcaaacggcgagaaagcggaatggacggcggatcaccagcacggccaccgctgtaattatccagaccgatatgaattttaccgtcgaggaacgtcccaacggtgagcacgacggctttggcacggaacttcagtcccatttgggtaacagcaccgaccacgcgatcgttttcgacaataagatcttcaaccgcctgctggaagatcatcaggttcggttggttctccagcgccgtacgtaccgcctgacggtagagcacacgatccgcctgagctcgggtagcgcgaaccgccggtcctttgcttgcgtttagtatcctaaactggatacccgcctgatcgatcgctttcgccatcagaccgccgagtgcatccacttcttttaccagatgtcccttcccaataccgccgatcgccgggttgcagctcatctgccccagagtgtcgatattgtgtgtcaaaagcagagtctgttgacccatacgcgccgcggccatcgcggcctcggtgcctgcatgacccccgccaatgatgatgacgtcaaaaggatccggataaaacatggtgattgcctcgcataacgcggtatgaaaatggattgaagcccgggccgtggattctactcaactttgtcggcttgagaaagacctgggatcctgggtattaaaaagaagatctatttatttagagatctgttctattgtgatctcttattaggatcgcactgccctgtggataacaaggatccggcttttaagatcaacaacctggaaaggatcattaactgtgaatgatcggtgatcctggaccgtataagctgggatcagaatgaggggttatacacaactcaaaaactgaacaacagttgttctttggataactaccggttgatccaagcttcctgacagagttatccacagtagatcgcacgatctgtatacttatttgagtaaattaacccagcttcccagccattcttctgccggatcttccggaatgtcgtgatcaagaatgttgatcttcagtgtttcgcctgtctgttttgcaccggaatttttgagttctgcctcgagtttatcgatagccccacaaaaggtgtcatattcacgactgccaataccgattgcgccaaagcggactgcagaaagatcgggcttctgttcctgcaatgcttcatagaaaggagaaaggttgtccggaatatctccggcaccgtgggtggagctgataaccagccagatcccactggcaggtaaatcttctaacagcggaccgtgcagcgtttcggtggtaaaacccgcctcttccagcttttcagccaggtgttctgctacatattcggcaccgccgagggtgctgccgctgataagagtgatatctgccataaaccgccacctttattaagagtggcgtattgtacgctgtgaacgcgttgggatctacctgtggaaaagtatgggattaaaaaagccgatcagggcttgatggtacgcatgatcgggttttgcaggacgatcaatgtctcggtggactgaatttcatcaattgtttggatcttgttgataagtacatgctggagagcgtcgatgctacggcacatcacttttataaagatgctgtagtggccggttgtgtaataggcttcagtgacttcatcaaggctttccagctttgccagcgcggaagggtagtctttggcgctctttaatataatgccgataaagcagcctacgtcataaccgagctgcttcgggctgacatcaatacgcgccccggtaatgatccccgcctgcttcattttctctactcgaacgtgaatcgtccccggactgacgccaaattgtttcgccagttcggcgtaagcggtgcgcgcattgcccattaatgcttccaggatgccacggtccagattgtcgatcagataattttccataggattttcttatgcggattgatgattcattctattttagccttcttttttaatgaatcaaaagtgagttaggctttttattgaatgattattgcatgtgtgtcggtttttgttgcttaatcataagcaacaggacgcaggagtataaaaaatgaaaaccgcttacattgccaaacaacgtcaaattagcttcgtgaaatctcacttttctcgtcaactggaagaacgtctggggctgatcgaagtccaggcgccgattcttagccgtgtgggggatggcacgcaggataacttgagcggctgtgaaaaagcggtgcaggtaaaagtgaaagctctgcctgatgcccagttcgaagtggttcatagtctggcgaagtggaaacgtcagaccttagggcaacacgacttcagcgcgggcgaagggctgtacacgcacatgaaagcccttcgccccgatgaagaccgtctttctccgttgcacagcgtctatgttgaccagtgggactgggaacgcgtaatgggcgacggtgagcgtcaattcagcactctgaaaagcacggtagaggcgatctgggcgggaattaaagcaaccgaagctgcggttagcgaagagtttggcctggcaccgttcctgccggatcagatccacttcgtacacagccaggagttactgtctcgttatccggatcttgatgccaaagggcgtgagcgggcgatagcgaaagatcttggcgcggtattccttgtcgggattggcggcaagctgagcgatggtcatcgccacgacgtgcgcgcaccggattatgatgactggagcaccccgagtgagctgggccatgcgggtctgaacggcgatattctggtgtggaacccggtactggaagatgcgtttgagctttcctccatggggatccgtgtagatgccgacacgctgaagcatcaactggcgctgaccggtgacgaagatcgcctggagctggagtggcatcaggcgctgctgcgcggtgaaatgccgcagaccatcggcggcggtatcggccagtctcgtttgactatgctgctgctgcaactgccgcatatcggccaggttcagtgtggagtatggccagctgctgttcgcgagagcgtcccttctctgctgtaataatttatcgccgccagcgtctgagcaggcggcttcgcatcccggtatcaaagcgccagatatgatcgaaaatgcgcatgatgccgggtttgccgtgtgcgctcatcgccacggcatgaaagcgatgctgatgtacccgctgcagctctttcactttactcgtcacgtcgtcaggcaaccgctgagcgataaaatcagaaatcaccaccgcatcggcatcaaaccattccctgctttgcaagcgttccataatggcgcgaaaacaactggcaagatcggtgccgccacgaaactgctggcttaaaaaacggattgcttgttcgatgccttgtgggccactaagctcataacggacgatctcggtggaaaatagcataatatagcagcgccggttttctgcgagagcaatgcgcatcaaggccaggcagaacgctttcgcacactgttcattaaagccgcccatactgccggaagtatccacacagacaataaacggcccgcgcggctgttcatcgtaatctttatgtaccaccggacgttcgatcactttttcacgccagctctcaccgtgcaggcgataggtgagcaactgtttttccaccagccgacggtaaaactcatactccagttccgttatccctagtgtcgccagttctggcggcaggagacgtaaaatatcatcgctttgttgcagaccatcaacctgctcaggaaccgtcgccggttcgcgcaccatggtgcggaaggtttccatctgcgcatcgttgcgcggtatacttttggcttcccgagaacgccccagctgctctgccaggcgtttcagttccggctgttcgttaagaaattcaccgtatttcacaatcaactgatagtcgccacgtttaagctgaccggcgctcatatcccacagacgaccagctgcagtattgttatctgcgagaatcggttcaagttgtccgctcagcgtcatgcgttcctgaacttcactcaacagttgttcgcgttcttcttctaatagctgttgatttaacgtcgttgcttgcacgatcagacttaaacgccaacgctggagaaaaagcgtgtgtaacgcactagtgatcgtgctgttagcatcaaccaactgtcgggcttgttctgcccatggagaattcagacgatgcagtaagtccaggatctgtggtagctgcacaataaactgtggcgtggagaggagctggctttgctgatagcacatcacctcttcggtgagttccggcgggactcgggcatctttcagccgactgcgcagcgcttcacgccagcggggaacatcatcagtgattgccgccttcaggcgtgggaatttttcaaagaagaccgccagctgcggactggccagcagtgcgatgatcatctcttcgatcaatccctcttcgctgacggccagcatcacattaagcgtatccagcgttagcattgttgtgcctggcgaatctgtgcaccgacatcctgtaggctggcttcaatgcgacctaaccagtcgccagggataaacagacatttttgctgttcgctgaataaagcgtgttgcttgcgccagtcgctttcaagctcttccagttgttgttttatttcaccaggcagaccttcagcgctactaccgggaagtgccagcgtactgccttgtaaacttacatcgcgaacgacaagatgttgggcgctatcaacttccagattcagtttctgggcaaagccgataccgttcagtttaccgcgaatttcaccacctttgctcagccactgttccagcgcgctacgctcaaaggagatatgaaccacttccatatcatgcagttttaacggtttttgcagcagtagagtcagagtggaagcagtaacgttaacaggaagttgatactgctgacgacggctgaaaatgccgcccagacgaattaccgttaaggctgttttatcgctttgttgctgctggagttgcaggtgacgttgcacaatcgcgccaaggcgagtcaacatcccttgctgttgccaggcgtgaccggtcatcaatacatcaatttgttgttgtatcaaattcaggctttgcgcgtcataccacaggcaatctttcagcaaaatgagatctaccggggcaacagcactgcgaccgctaaaaaaggcgctggcctgcaataatcggatcgcttttttccagcgacgatcgctgacataaggcgcatccggtaatttatccagttgctggcgcagcataaaaatcagctcaaatacatgatcgggcagcgtaatttcaccaatctctttctgccagcgttcatattcttcatctgtgacctgcaaggcatcaggaaccggattgtcgttttcatcctgttgactggtcagcatggagcggaaattcgctttatcctgcactttatctaaccacagacgaatcagcatgcggtcatataacgcttccagactgctgtctgcttccggcagctcgttggaggccgccaccagcagacgcatcgggattttttctacgtgtgcaccgttgcggaactggcgctcgttaatggcggtgagcaaggtattaagaattgccgggcccgctttccagatctcatccagaaagacaatttctgcttccggcaggtaaccgctggttaaacgttcatagcgcccttcatcttttagcgcctgaatagaaaggggaccaaaaacttcttccggcgtggagaagcgggtcatcagatattcaaacgcgcgggcattctgaaaggcgaattttaagcgccgggcgatcaaacttttggcaatacctggcgggccaaggaggaacacactttcaccacttaatgccgctaataaacacaagcggatggcgtggctacgttcataaagccccttttccaagctactgctcaggcgggaaattctttccgctaataaatgagggtgagccataatgaagtggcgtcctttcgtcaaaagttctgcgtaaattgcgagtatagacgtttcttgctggtggctaaaatagtctcaaagggggggtatttttctttgagccaggttaatgtggccgcatttaggagtacgattttgccgttaatcgtgcatactgtgcgcttttttgtgggccaagggactaagcacacatttcatatttcaacgaaagactagtctatgagcactgataataagcaaagtttgcccgcgattaccctcgcggcgattggagttgtctacggcgatattggtaccagcccgttatatacacttcgtgaatgtttgtccggccagtttggttttggcgttgaacgcgatgccgtgtttggctttttaagcctgatcttctggctgctaatctttgtggtttccattaaatatctcaccttcgtgatgcgggcagataacgccggtgagggggggatcctgacgttgatgagccttgccgggcgtaatacgagcgcgcgaaccacaagtatgctggtgattatggggctaatcggcggcagctttttctatggtgaagtcgtcataacacccgctattagcgtgatgagtgccattgaaggtctggaaatcgtcgccccgcagctggatacctggatagttcccctcagtattatcgttctcactttattatttatgattcaaaaacatggcacggctatggtcggtaagctgtttgcgccgatcatgctgacctggtttttgattctggcaggactggggttacgtagcattattgctaacccggaagtgctgcatgcgctgaatccaatgtgggcggtgcatttcttccttgaatacaaaacggtttcttttattgcattaggggcagtggtgttgagcattacgggggtcgaggcgctgtatgctgatatggggcactttggtaagttccctattcgcctggcgtggttcaccgtcgtattaccttccttgacccttaattacttcggtcagggagcgctgttgttaaagaacccggaagcgattaagaacccgttcttcctgttggcaccggactgggcgctgatcccgctgctgatcatcgccgcactggcgacggtaattgccagccaggcggttatctctggcgtcttcagtttgacgcgtcaggcggtacgtctgggatatttgagcccgatgcgcattattcacacctccgaaatggagagtgggcaaatctatattccgtttgtgaactggatgctctatgtcgcggtcgtgattgtgattgtcagctttgagcactccagcaacctggcggcggcgtacgggattgcggtgaccggaaccatggtgctgacgtctattctcagcactaccgtggcacgtcagaactggcactggaataagtattttgttgcgctgatcctgattgctttcctttgtgtcgatattccattgttcaccgctaacctcgataaactgctctccggcggctggttgccattgagcctcggtactgtgatgtttatcgtgatgaccacctggaagagcgagcgtttccgcttgctgcggcggatgcatgaacatggtaactctctggaagcgatgattgctagcctggagaaaagtccgcctgttcgcgtgcccgggaccgcggtgtatatgagccgtgcaatcaacgtcattccctttgcgctgatgcataaccttaaacataacaaggtattgcatgagcgggtgattctgttaactctgcgcaccgaagacgctccatatgtccataacgtccgtcgggtacagattgaacaactgagccccactttctggcgcgtggtggcaagttatggttggcgagaaacgccaaacgtagaagaagttttccaccgctgcggtctggaaggattaagttgccggatgatggaaacctccttctttatgagccatgagagcttgatcctcggcaaacgcccgtggtatttgcgtctgcgcggcaagctgtacttgctgctgcaacgtaatgcgctgcgtgcaccagatcaatttgaaatcccgccaaacagggttatcgaactgggtactcaggtcgaaatctaacgccagacgcctcctttcttcataagggggcgtttttgttttcatggttaatcaccatgtaaaacgtttcgaggttgatcacatttccgtaacgtcacgatggttttcccaactcagtcaggattaaactgtgggtcagcgaaacgtttcgctgatggagaaaaaaatgaaaaaaggcaccgttcttaattctgatattagtagcgtgatctcccgtctgggacataccgatacgctggtggtgtgtgatgctggtttacccatccccaaaagtacaacgcgtatcgatatggcattaacccagggtgtaccttcttttatgcaggtgctgggcgtcgtcacaaatgaaatgcaggtcgaggcggccattatcgcggaagagatcaaacaccataatccgcaactccacgaaacgttgctcactcaccttgagcagctgcaaaaacaccagggaaataccattgaaattcgttacaccacgcatgaacaattcaaacaacaaaccgcagaaagtcaggcggtaattcgcagcggagaatgttctccgtatgcgaatatcattctctgtgctggcgtgacgttctgaggccgtcatggaagcattacttcagcttaaaggcatcgataaagccttcccgggcgtaaaagccctcagcggcgcagcgttaaatgtctatccgggccgcgtgatggcgctggtgggcgaaaacggcgcgggtaaatccaccatgatgaaagtgcttactggcatctatactcgcgatgccggtacgcttttatggctggggaaagaaacgacatttaccgggccaaaatcttcccaggaagccgggattgggattatccatcaggaactgaacctgatcccgcagttgaccattgccgaaaacattttcctcggtcgtgagtttgttaatcgctttggcaaaattgactggaaaaccatgtatgccgaagcggataaattgctggctaaacttaacctgcgctttaaaagcgacaagctggtgggcgatctttccatcggtgaccagcaaatggttgaaatcgccaaagtgctgagctttgagagcaaagtcatcattatggatgaaccgaccgatgcgctgaccgataccgaaaccgaatccctgttccgcgtcatccgcgagctgaaaagccaaggccgcggtattgtctatatctcccaccgcatgaaagaaatcttcgagatttgcgatgacgttaccgtttttcgtgatgggcaatttattgctgagcgcgaagtggcaagtctgaccgaagatagcctgattgagatgatggtgggtcgcaagctggaagatcaatatccgcacctggacaaagcgccgggagatatccgcctgaaagtcgataatctctgcggacctggcgttaacgatgtctcttttactttacgcaaaggcgaaattcttggcgtctctggtttgatgggcgcaggtcgtaccgaactgatgaaagtgctctacggcgcactaccgcgcaccagcggttacgtcaccctggatgggcatgaagtcgttacccgtagtccgcaggatggcctggcaaacggcattgtgtatatctccgaagaccgtaaacgtgacggtttagtgttgggcatgagtgtaaaagagaacatgagcctgacagcgctgcgctacttcagccgcgctggcggcagtttgaagcatgccgatgaacagcaggctgtgagtgatttcattcgtctgtttaatgtgaaaactccgagcatggaacaggcaattggtctgctttccggtggcaatcagcaaaaagtggcgattgcccgcggtctgatgacacgccccaaagtgttgatccttgatgaacctacccgtggcgtagatgtcggcgcgaaaaaagagatctatcaactgattaaccagttcaaagccgatggcttgagcatcattctggtgagtagcgagatgccagaagtattaggcatgagcgatcgcatcatcgtcatgcatgaagggcatctcagcggggaatttactcgtgagcaggccacccaggaagtgttaatggctgccgctgtgggcaagcttaatcgcgtgaatcaggagtaaaaaaatgacaacccagactgtctctggtcgccgttatttcacgaaagcgtggctgatggagcagaaaagccttatcgctctgctggtgctgatcgcgattgtcagcacgttaagcccgaactttttcaccatcaataacttattcaatattctccagcaaaccagtgtgaacgccattatggcggtcgggatgacgctggtgatcctgacgagcggcatcgacttaagcgtaggttctctgttggcgctgaccggcgcagttgctgcatctatcgtcggcattgaagtcaatgcgctggtggctgtcgctgctgctctcgcgttaggtgccgcaattggtgcggtaaccggggtgattgtagcgaaaggtcgcgtccaggcgtttatcgctacgctggttatgatgcttttactgcgcggcgtgaccatggtttataccaacggtagcccagtgaataccggctttactgagaacgccgatctgtttggctggtttggtattggtcgtccgctgggcgtaccgacgccagtctggatcatggggattgtcttcctcgcggcctggtacatgctgcatcacacgcgtctggggcgttacatctacgcgctgggcggcaacgaagcggcaacgcgtctttctggtatcaacgtcaataaaatcaaaatcatcgtctattctctttgtggtctgctggcaagcctggccgggatcattgaagtggcgcgtctctcctccgcacaacccacggcggggactggctatgagctggatgctattgctgcggtggttctgggcggtacgagtctggcgggcggaaaaggtcgcattgttgggacgttgatcggcgcattaattcttggcttccttaataatggattgaatttgttaggtgtttcctcctattaccagatgatcgtcaaagcggtggtgattttgctggcggtgctggtagacaacaaaaagcagtaataacgactacaggacatcttgaatatgaacatgaaaaaactggctaccctggtttccgctgttgcgctaagcgccaccgtcagtgcgaatgcgatggcaaaagacaccatcgcgctggtggtctccacgcttaacaacccgttctttgtaagcctgaaagatggcgcgcagaaagaggcggataaacttggctataacctggtggtgctggactcccagaacaacccggcgaaagagctggcgaacgtgcaggacttaaccgttcgcggcacaaaaattctgctgattaacccgaccgactccgacgcagtgggtaatgctgtgaagatggctaaccaggcgaacatcccggttatcactcttgaccgccaggcaacgaaaggtgaagtggtgagccacattgcttctgataacgtactgggcggcaaaatcgctggtgattacatcgcgaagaaagcgggtgaaggtgccaaagttatcgagctgcaaggcattgctggtacatccgcagcccgtgaacgtggcgaaggcttccagcaggccgttgctgctcacaagtttaatgttcttgccagccagccagcagattttgatcgcattaaaggtttgaacgtaatgcagaacctgttgaccgctcatccggatgttcaggctgtattcgcgcagaatgatgaaatggcgctgggcgcgctgcgcgcactgcaaactgccggtaaaagcgatgtgatggtcgtcggatttgacggtacaccggatggcgaaaaagcggtgaatgatggcaaactagcagcgactatcgctcagctacccgatcagattggcgcgaaaggcgtcgaaaccgcagataaagtgctgaaaggcgagaaagttcaggctaagtatccggttgatctgaaactggttgttaagcagtaattttaatcaggttgtatgacctgatggtgacataaatacgtcatcgacagatgaacgtgtaatataaagaaaagcagggcacgcgccaccctaacacggtggcgcattttatggacatcccgaatatgcaaaacgcaggcagcctcgttgttcttggcagcattaatgctgaccacattcttaatcttcaatcttttcctactccaggcgaaaccgtaaccggtaaccactatcaggttgcatttggcggcaaaggcgcgaatcaggctgtggctgctgggcgtagcggtgcgaatatcgcgtttattgcctgtacgggtgatgacagcattggtgagagcgttcgccagcagctcgccactgataacattgatattactccggtcagcgtgatcaaaggcgaaagtacaggtgtggcgctgatttttgttaatggcgaaggtgagaatgtcatcggtattcatgccggcgctaatgctgccctttccccggcgctggtggaagcgcaacgtgagcgtattgccaacgcgagtgcattattaatgcagctggaaagtccactcgaaagtgtgatggcagcggcgaaaatcgcccatcaaaataagactatcgttgcgcttaacccggctccggctcgcgaacttcctgacgaactgctggcgctggtggacattattacgccaaacgaaacggaagcagaaaagctcaccggtattcgtgttgaaaatgatgaagatgcagcgaaggcggcgcaggtactgcatgaaaaaggtatccgtactgtactgattactttaggaagtcgtggtgtatgggctagcgtgaatggtgaaggtcagcgcgttcctggattccgggtgcaggctgtcgataccattgctgccggagatacctttaacggtgcgttaatcacggcattgctggaagaaaaaccattgccagaggcgattcgttttgcccatgctgccgctgcgattgccgtaacacgtaaaggcgcacaaccttccgtaccgtggcgtgaagagatcgacgcatttttagacaggcagaggtgacgcttggctacaatgaaagatgttgcccgcctggcgggcgtttctaccagtacagtttctcacgttatcaataaagatcgcttcgtcagtgaagcgattaccgccaaagttgaagcggcgattaaagaactcaattacgcgccaagtgctctggcgcgtagcctcaaactcaatcaaacacataccattggcatgttgatcactgccagtaccaatcctttctatagtgaactggtgcgtggcgttgaacgcagctgcttcgaacgcggttatagtctcgtcctttgcaataccgaaggcgatgaacagcggatgaatcgcaatctggaaacgctgatgcaaaaacgcgttgatggcttgctgttactgtgcaccgaaacgcatcaacctagccgtgaaatcatgcaacgttatccgacagtgcctactgtgatgatggactgggctccgttcgatggcgacagcgatcttattcaggataacagcttgctgggcggagacttagcaacgcaatatctgatcgataaaggtcatacccgtatcgcctgtattaccggcccgctggataaaactccggcgcgcctgcggttggaaggttatcgggcggcgatgaaacgtgcgggtctcaacattcctgatggctatgaagtcactggtgattttgaatttaacggcgggtttgacgctatgcgccaactgctaagtcatccgctgcgtcctcaggccgtctttaccggaaatgacgctatggctgttggcgtttaccaggcgttatatcaggcagagttacaggttccgcaggatatcgcggtgattggctatgacgatatcgaactggcaagctttatgacgccaccattaaccactatccaccaaccgaaagatgaactgggggagctggcgattgatgtactcatccatcggataacccagccgacccttcagcaacaacgattacaacttactccgattctgatggaacgcggtagcgcttaattactcgctttcacttggaacgcggttcggcttagatttacgctgtcttttgatcaaattattaccatcggttgttttcagaagcatgaacattgctgcactagcaacagtaataatgcccattgtgataaacgtatagtggaattgttcgacagtcgttgtgccttccattccttcataaacgcgaaggacggccgcacttacagcaacgcctaaactaatgctcagttgctgcgtgaccgccagaacactgttaccgctgctggcattgtcatcggtcagatcggcaagtgtgatggtattcatcgcggtaaactgcgtgctcatagccatccctaatataaacaacggcaagatcagcatccatatagccattgctggactttgcaaagagaactgagcgatcattagcccaataatcaccgtgatccccactaacgtatggcgatagcccagacgacgtaagacttgggtaaccatgctttttgcaataatggaacctaacgctgtcggtgccatcatacagccagcaataaacgcctgataaccaaatcctacctgtaacatcaatggcataaggaacggtacacagccggtccccagacgggttgcaatattgcctacgataccgatgctgaaagtgcgggttttaaataaatctaaactaattaatgggtttggcgtgcgtcgtgcatggagaatatagagaagcagtaacccgatgctggtgacaattaccgtcaaggcaatccagctggcgacaatcttttccccgaatagctctattccgctactgaagagaacaaggctgaggccaaacagcaaaaagccagtgatatcgaatctgcgtcgtgcggtggtgaaattgggcatatgtttgcgcgcgtaaagaaggcccgcaatacctatggggatattgattaaaaatatccagtgccaggttgcccaggtgaccagcacgccgccaagaacggggcctaaaattggccccaccagacccggcatggcgacaaaattcaatactggaagaagttcattacgaggataagcgcgcagtaaggccagccgagcaacaggcatcatcattgcgccgcctatcccctgaataacccggaagacaaccagctgtggtaggctattagaaagtgcgcaggccagagaacccaatgtgaacagactcacggcaagggtaaaaatgcgacgcgtaccgaagcgatcggctagccatccgcttaccggaataagcatcgccaccgtcagcgtataactgatgatggcactttgcatcgcgagaggagaacgattaaggctatgagcgattgcgggtaaggcggtattaagaatagtggcatcaagtgcctgcatgaagaaggccatcgccgcgatccacggcaaacccgccatactgcgcttctttttatcgctcattcaatgtcctgttatcgggttatcacttatcaggactgcgtagcagcgcctgacaagctttaaatgccgcgtcgccatcgctttggataatcgcatcgacaatcgcctgatgcagatccagctttatcactgtgtcgctggtaatactcgtgaagtaagtgtgataaacgctatggaataggctggcgaaactggtcaaaaacggattggcgctcatttcatagatatgctcatgccaggccatatcgacttcgatccagcgttcacggcgaaagttctcttttaatgccgccatttcggccattaacgtattgagatgcgctttctgttccgcggtgccaaccgttgctgccagtaggcaggcttgcggctccagacagatacgcataaccagaaagtgatcgatgacctgatgaaagttctcttctgtcatccaccaggtaagcaattcctgatcaagaaaattccagttgctttgtggcatgacccgagtaccaattcgcggtcgcggtaaaaccatcccttttgccgttaacgttttgaccgcttcgcgtaccgctgtacgactcactccaaattgctcgcccagctcaatctcaccgggcaaaatggtgccgggttcatattcaccttttaagatccgttgcgccagcttctcagccagaacatagctaaggtttttctgtgcagctaactgttgtgcgcttaaaggcattacttatcttcctttttctttttattcctccttagtatgccaccaggaagtgtgattacggttgcaaaaacggcaaattgcttgttttatggcacattaacggggcttttgctgaaaaaatgcgcggtcagaaaattattttaaatttcctcttgtcaggccggaataactccctataatgcgccaccactgacacggaacaacggcaaacacgccgccgggtcagcggggttctcctgagaactccggcagagaaagcaaaaataaatgcttgactctgtagcgggaaagcgtattatgcacaccccgcgccgctgagaaaaagcaaagcggcactgctctttaacaatttatcagacaatctgtgtgggcactcgaagatacggattcttaacgtcgcaagacgaaaaatgaataccaagtctcaagagtgaacacgtaattcattacgaagtttaattctttgagcatcaaacttttaaattgaagagtttgatcatggctcagattgaacgctggcggcaggcctaacacatgcaagtcgaacggtaacaggaaacagcttgctgtttcgctgacgagtggcggacgggtgagtaatgtctgggaaactgcctgatggagggggataactactggaaacggtagctaataccgcataacgtcgcaagaccaaagagggggaccttcgggcctcttgccatcagatgtgcccagatgggattagctagtaggtggggtaacggctcacctaggcgacgatccctagctggtctgagaggatgaccagccacactggaactgagacacggtccagactcctacgggaggcagcagtggggaatattgcacaatgggcgcaagcctgatgcagccatgccgcgtgtatgaagaaggccttcgggttgtaaagtactttcagcggggaggaagggagtaaagttaatacctttgctcattaacgttacccgcagaagaagcatcggctaactccgtgccagcagccgcggtaatacggagggtgcaagcgttaatcggaattactgggcgtaaagcgcacgcaggcggtttgttaagtcagatgtgaaatccccgggctcaacctgggaactgcatctgatactggcaagcttgagtctcgtagaggggggtagaattccaggtgtagcggtgaaatgcgtagagatctggaggaataccggtggcgaaggcggccccctggacgaagactgacgctcaggtgcgaaagcgtggggagcaaacaggattagataccctggtagtccacgccgtaaacgatgtcgacttggaggttgtgcccttgaggcgtggcttccggagctaacgcgttaagtcgaccgcctggggagtacggccgcaaggttaaaactcaaatgaattgacgggggcccgcacaagcggtggagcatgtggtttaattcgatgcaacgcgaagaaccttacctggtcttgacatccacggaagttttcagagatgagaatgtgccttcgggaaccgtgagacaggtgctgcatggctgtcgtcagctcgtgttgtgaaatgttgggttaagtcccgcaacgagcgcaacccttatcctttgttgccagcggtccggccgggaactcaaaggagactgccagtgataaactggaggaaggtggggatgacgtcaagtcatcatggcccttacgaccagggctacacacgtgctacaatggcgcatacaaagagaagcgacctcgcgagagcaagcggacctcataaagtgcgtcgtagtccggattggagtctgcaactcgactccatgaagtcggaatcgctagtaatcgtggatcagaatgccacggtgaatacgttcccgggccttgtacacaccgcccgtcacaccatgggagtgggttgcaaaagaagtaggtagcttaaccttcgggagggcgcttaccactttgtgattcatgactggggtgaagtcgtaacaaggtaaccgtaggggaacctgcggttggatcacctccttaccttaaagaagcgttctttgcagtgctcacacagattgtctgataggaagtgaaaagcaaggcgtcttgcgaagcagactgatacgtccccttcgtctagaggcccaggacaccgccctttcacggcggtaacaggggttcgaatcccctaggggacgccacttgctggtttgtgagtgaaagtcacctgccttaatatctcaaaactcatcttcgggtgatgtttgagatatttgctctttaaaaatctggatcaagctgaaaattgaaacactgaacaacgaaagttgttcgtgagtctctcaaattttcgcaacacgatgatgaatcgaaagaaacatcttcgggttgtgaggttaagcgactaagcgtacacggtggatgccctggcagtcagaggcgatgaaggacgtgctaatctgcgataagcgtcggtaaggtgatatgaaccgttataaccggcgatttccgaatggggaaacccagtgtgtttcgacacactatcattaactgaatccataggttaatgaggcgaaccgggggaactgaaacatctaagtaccccgaggaaaagaaatcaaccgagattcccccagtagcggcgagcgaacggggagcagcccagagcctgaatcagtatgtgtgttagtggaagcgtctggaaaggcgcgcgatacagggtgacagccccgtacacaaaaatgcacatattgtgagctcgatgagtagggcgggacacgtggtatcctgtctgaatatggggggaccatcctccaaggctaaatactcctgactgaccgatagtgaaccagtaccgtgagggaaaggcgaaaagaaccccggcgaggggagtgaaaaagaacctgaaaccgtgtacgtacaagcagtgggagcacgcttaggcgtgtgactgcgtaccttttgtataatgggtcagcgacttatattctgtagcaaggttaaccgaataggggagccgaagggaaaccgagtcttaactgggcgttaagttgcagggtatagacccgaaacccggtgatctagccatgggcaggttgaaggttgggtaacactaactggaggaccgaaccgactaatgttgaaaaattagcggatgacttgtggctgggggtgaaaggccaatcaaaccgggagatagctggttctccccgaaagctatttaggtagcgcctcgtgaattcatctccgggggtagagcactgtttcggcaagggggtcatcccgacttaccaacccgatgcaaactgcgaataccggagaatgttatcacgggagacacacggcgggtgctaacgtccgtcgtgaagagggaaacaacccagaccgccagctaaggtcccaaagtcatggttaagtgggaaacgatgtgggaaggcccagacagccaggatgttggcttagaagcagccatcatttaaagaaagcgtaatagctcactggtcgagtcggcctgcgcggaagatgtaacggggctaaaccatgcaccgaagctgcggcagcgacgcttatgcgttgttgggtaggggagcgttctgtaagcctgcgaaggtgtgctgtgaggcatgctggaggtatcagaagtgcgaatgctgacataagtaacgataaagcgggtgaaaagcccgctcgccggaagaccaagggttcctgtccaacgttaatcggggcagggtgagtcgacccctaaggcgaggccgaaaggcgtagtcgatgggaaacaggttaatattcctgtacttggtgttactgcgaaggggggacggagaaggctatgttggccgggcgacggttgtcccggtttaagcgtgtaggctggttttccaggcaaatccggaaaatcaaggctgaggcgtgatgacgaggcactacggtgctgaagcaacaaatgccctgcttccaggaaaagcctctaagcatcaggtaacatcaaatcgtaccccaaaccgacacaggtggtcaggtagagaataccaaggcgcttgagagaactcgggtgaaggaactaggcaaaatggtgccgtaacttcgggagaaggcacgctgatatgtaggtgaagcgacttgctcgtggagctgaaatcagtcgaagataccagctggctgcaactgtttattaaaaacacagcactgtgcaaacacgaaagtggacgtatacggtgtgacgcctgcccggtgccggaaggttaattgatggggtcagcgcaagcgaagctcttgatcgaagccccggtaaacggcggccgtaactataacggtcctaaggtagcgaaattccttgtcgggtaagttccgacctgcacgaatggcgtaatgatggccaggctgtctccacccgagactcagtgaaattgaactcgctgtgaagatgcagtgtacccgcggcaagacggaaagaccccgtgaacctttactatagcttgacactgaacattgagccttgatgtgtaggataggtgggaggctttgaagtgtggacgccagtctgcatggagccgaccttgaaataccaccctttaatgtttgatgttctaacgtggacccgtgatccgggttgcggacagtgtctggtgggtagtttgactggggcggtctcctcctaaagagtaacggaggagcacgaaggttggctaatcctggtcggacatcaggaggttagtgcaatggcataagccagcttgactgcgagcgtgacggcgcgagcaggtgcgaaagcaggtcatagtgatccggtggttctgaatggaagggccatcgctcaacggataaaaggtactccggggataacaggctgataccgcccaagagttcatatcgacggcggtgtttggcacctcgatgtcggctcatcacatcctggagctgaagtaggtcccaagggtatggctgttcgccatttaaagtggtacgcgagctgggtttagaacgtcgtgagacagttcggtccctatctgccgtgggcgctggagaactgaggggggctgctcctagtacgagaggaccggagtggacgcatcactggtgttcgggttgtcatgccaatggcactgcccggtagctaaatgcggaagagataagtgctgaaagcatctaagcacgaaacttgccccgagatgagttctccctgactccttgagagtcctgaaggaacgttgaagacgacgacgttgataggccgggtgtgtaagcgcagcgatgcgttgagctaaccggtactaatgaaccgtgaggcttaaccttacaacgccgaagatgttttggcggatgagagaagattttcagcctgatacagattaaatcagaacgcagaagcggtctgatgaaacagaatttgcctggcggccgtagcgcggtggtcccacctgaccccatgccgaactcagaagtgaaacgccgtagcgccgatggtagtgtggggtctccccatgcgagagtagggaactgccaggcatcaaattaagcagtaagccggtcataaaaccggtggttgtaaaagaattcggtggagcggtagttcagtcggttagaatacctgcctgtcacgcagggggtcgcgggttcgagtcccgtccgttccgccaccctaattaggggcgtagttcaattggtagagcaccggtctccaaaaccgggtgttgggagttcgagtctctccgcccctgccagaaatcatccttagcgaaagctaaggattttttttatctgaaataaccctctccgaagtaaatccttctaccggcatccttgccagccattcatattaatacacttcatccagcacgttaattttcaaaagatcgcgaatcaacgcatttttatcgctattttgcagccatatggcataaagcggccgactaagtgttgtgctatcgacaacggtatgcaggccgccttttttacgcgcccagctgacgggtagccaggtgcaaccattaagcatcgcaatctgttgctgtgccagttcagcagaactggttgtcagaatgggcacttcgtcagcaccgatcaaacctgcctcatgctgttgaaaatctggcccccactcaagtcgcagataattaagatctccctttagtttactaggggcactggtataaagcgctaaagtgaaatatcccagcaactgactactaaattcgtccattttgggcgcttcagtggtaataagaagatcaagctggcgttcatgcagctgttttaccagagactgccgttgggcaattcgcgcttcgaactgtaagcctgtatgggcatcctgattttgatacaagcgtcccagccactgattaagcatacattcccacaagctggcgctggcaccgatagaaaactcgttatgtcgactggtatgcgccacctccttacgggcggcctgccaggtgctcatgagcgtttctgcataaggcagtagtttttcaccggcagcggttaaacggatattgtttctgtggcgggtgaaaaggttcacacccagttgattttccagttgtctgattcgaaagctcactgcactctgggtcagatagaggctttcagccgctcgaccaaagtgacgcgttcggctaacttccaggaaagtttttaacaattccgtatccacagtgctctccgcaaaattatttgtcgttatgatttaaatgttttgttttacactctgtcaagcgtaactaatactccgcgccataactagctcggtcaaagaattaggagcgtgcaggatggcggaaagctttacgacgactaatcgatatttcgacaataaacattatccacgtggattctctcgtcatggtgatttcaccatcaaagaggcacaactgcttgagcgtcatggttatgccttcaatgagttggatcttggcaaacgcgagccggttaccgaggaagagaaactcttcgtagcagtatgccgtggcgaacgtgagccagtgacagaagcagaacgcgtgtggtccaagtatatgacgcgtattaagcgtccaaaacgttttcacaccctttccggcggtaaaccgcaggttgaaggtgctgaagactacaccgattctgacgattaataaaaagggcgaaatgccctttttttatgtcagtagtttctgcagatggatgagcaaacggtcaatcgctcgatagctaactgcctcctgcaaatgctgacgtgtgataatgtcagactgatcaatatcagcaatggttcgtgcaactttcaataaccgctgccaggcacgaatgcttaaccccagatggatcagtgttccttccaaccacatcgcatcttcgctctcaagtttgcagaattggcgtatttccggactatccagccaggcattcagtttattctgccgcttaaattggcgctctctggcggccattacgcgttgtttaacggtggcgctgctttctcccggcactaccgttttactcaaaatgccggggggtggtaatgggatctccagactgagatcgaagcggtcgagaaagggcccgctgagccggttgagataacgtaatgtctgttctggcgtgcagcggttatggtttccctgataatgtccggtagggctgggattcatcgccgcaacaagctggaaacgggctggataggttatttttgctcgtgtgcgactaagatggatctgcccggattcaatcggctctcgcaaggcatccagtgtacgccgttcaaattcaggtagctcatcaagaaaaagcacgccgttatgcgccaggctaatttcaccgggccctggaattgcgccaccgcctaccatcgcagttaagcttgcactgtgatgaggactgcggaacgggcgctgccgccattgtttttgtacactttcagcatttaccagacttaatatcgcagcactctccagtgcctcttcattgcttaaatctggcaacaggccattaatacggctggcgagcattgttttacctgttcccggcggcccaatcagtaaaaggttgtgcccgccagcagcggtaatttccagtcctcgctttccttgttcctgaccgataacatcactgagatcatgttgtagcgcccgggatactgcatcagttggtttcgggcgttcgagagcgtgcttaccttccagaaacgcacagacagcttgcagatgatcggctatcaggcatccttcaccgttaattagccccacttcatcttcgttatctttcgcgacgataatttttctgccgctcttaatagcttcagttgcactggagattgcgccgggaacgccacgcagagcgcctgtaagcgccagttctccgactaattcatattcatctaacttattggctgtaagctgttcactggccgccagcaacgcaatggcgataggtaaatcatatcgtcccccttcttttggcagatcagctggagccaggttgatggtgatttttttcgccggatattcatatccgctattgataatggcgctgcgcacgcgatcgcgagcttcttttaccgttgtttctggtaagcccaccatcgttaagccgggtagacctttactgatatgtacctcaacagtgatcgggggcgcatttactcccagggctgcgcgggtatgaacaatactcagactcataagccctccttgagtcaccattatgtgcataagatatcgctgctgtagcccgctaattcgtgaattttagtggctgattcctgtttatttgtgcaagtgaagttgagttgttctggcggtggaatgatgctcgcaaaaatgcagcggacaaaggatgaactacgaggaagggaacaacattcatactgaaattgaatttttttcactcactattttatttttaaaaaacaacaatttatattgaaattattaaacgcatcataaaaatcggccaaaaaatatcttgtactatttacaaaacctatggtaactctttaggcattccttcgaacaagatgcaagaaaagacaaaatgacagcccttctacgagtgattagcctggtcgtgattagcgtggtggtgattattatcccaccgtgcggggctgcacttggacgaggaaaggcttaaagatcaagccttaacgaactaagacccccgcaccgaaaggtccgggggttttttttgaccttaaaaacataaccgaggagcagacaatgaataacagcacaaaattctgtttctcaagattcaggacggggaactaactatgaatggcgcacagtgggtggtacatgcgttgcgggcacagggtgtgaacaccgttttcggttatccgggtggcgcaattatgccggtttacgatgcattgtatgacggcggcgtggagcacttgctatgccgacatgagcagggtgcggcaatggcggctatcggttatgctcgtgctaccggcaaaactggcgtatgtatcgccacgtctggtccgggcgcaaccaacctgataaccgggcttgcggacgcactgttagattccatccctgttgttgccatcaccggtcaagtgtccgcaccgtttatcggcactgacgcatttcaggaagtggatgtcctgggattgtcgttagcctgtaccaagcacagctttctggtgcagtcgctggaagagttgccgcgcatcatggctgaagcattcgacgttgcctgctcaggtcgtcctggtccggttctggtcgatatcccaaaagatatccagttagccagcggtgacctggaaccgtggttcaccaccgttgaaaacgaagtgactttcccacatgccgaagttgagcaagcgcgccagatgctggcaaaagcgcaaaaaccgatgctgtacgttggcggtggcgtgggtatggcgcaggcagttccggctttgcgtgaatttctcgctgccacaaaaatgcctgccacctgtacgctgaaagggctgggcgcagtagaagcagattatccgtactatctgggcatgctggggatgcacggcaccaaagcggcaaacttcgcggtgcaggagtgtgacctgctgatcgccgtgggcgcacgttttgatgaccgggtgaccggcaaactgaacaccttcgcgccacacgccagtgttatccatatggatatcgacccggcagaaatgaacaagctgcgtcaggcacatgtggcattacaaggtgatttaaatgctctgttaccagcattacagcagccgttaaatcaatgactggcagcaacactgcgcgcagctgcgtgatgaacattcctggcgttacgaccatcccggtgacgctatctacgcgccgttgttgttaaaacaactgtcggatcgtaaacctgcggattgcgtcgtgaccacagatgtggggcagcaccagatgtgggctgcgcagcacatcgcccacactcgcccggaaaatttcatcacctccagcggtttaggtaccatgggttttggtttaccggcggcggttggcgcacaagtcgcgcgaccgaacgataccgttgtctgtatctccggtgacggctctttcatgatgaatgtgcaagagctgggcaccgtaaaacgcaagcagttaccgttgaaaatcgtcttactcgataaccaacggttagggatggttcgacaatggcagcaactgttttttcaggaacgatacagcgaaaccacccttactgataaccccgatttcctcatgttagccagcgccttcggcatccatggccaacacatcacccggaaagaccaggttgaagcggcactcgacaccatgctgaacagtgatgggccatacctgcttcatgtctcaatcgacgaacttgagaacgtctggccgctggtgccgcctggcgccagtaattcagaaatgttggagaaattatcatgatgcaacatcaggtcaatgtaagcgctcgcttcaatccagaaaccttagaacgtgttttacgcgtggtgcgtcatcgtggtttccacgtctgcagtatgaatatggccgccgccagcgatgcacaaaatataaatatcgaattgaccgttgccagcccacggagcgtcgacttactgtttagtcagttaaataaactggtggacgtcgcacacgttgccatctgccagagcacaaccacaagtcaacaaatccgcgcctgagcgcaaaaggaatataaaaatgaccacgaagaaagctgattacatttggttcaatggggagatggttcgctgggaagacgcgaaggtgcatgtgatgagccacgcgctgcactatggcactagcgtttttgaaggcatccgttgctacgacagccacaaaggaccggttgtattccgccatcgtgagcatatgcagcgtctgcatgactccgccaaaatctatcgcttcccggttagccagagcattgatgagctgatggaagcttgtcgtgacgtgatccgcaaaaacaatctcaccagcgcctatatccgtccgctgatcttcgtcggtgatgttggcatgggagtaaacccgccagcgggatacagtaccgacgtgattatcgctgctttcccgtggggagcgtatctgggcgcagaagcgctggagcaggggatcgatgcgatggtttcctcctggaaccgcgcagcaccaaacaccatcccgacggcggcaaaagccggtggtaactacctctcttccctgctggtgggtagcgaagcgcgccgccacggttatcaggaaggtatcgcgctggatgtgaacggttatatctctgaaggcgcaggcgaaaacctgtttgaagtgaaagatggtgtgctgttcaccccaccgttcacctcctccgcgctgccgggtattacccgtgatgccatcatcaaactggcgaaagagctgggaattgaagtacgtgagcaggtgctgagccgcgaatccctgtacctggcggatgaagtgtttatgtccggtacggcggcagaaatcacgccagtgcgcagcgtagacggtattcaggttggcgaaggccgttgtggcccggttaccaaacgcattcagcaagccttcttcggcctcttcactggcgaaaccgaagataaatggggctggttagatcaagttaatcaataaatacaaaaaatgggacggcacgcaccgtcccatttacgagacagacactgggagtaaataaagtatgcctaagtaccgttccgccaccaccactcatggtcgtaatatggcgggtgctcgtgcgctgtggcgcgccaccggaatgaccgacgccgatttcggtaagccgattatcgcggttgtgaacagcttcacccaatttgtaccgggtcacgtccatctgcgcgatctcggtaaactggtcgccgaacaaattgaagcggctggcggcgttgccaaagagttcaacaccattgcggtggatgatgggattgccatgggccacggggggatgctttatagtctgccatctcgcgaactgatcgctgattccgttgagtatatggtcaacgcccactgcgccgacgccatggtctgcatctctaactgcgacaaaatcaccccggggatgctgatggcttccctgcgcctgaatattccggtgatctttgtttccggcggcccgatggaggccgggaaaaccaaactttccgatcagatcatcaagctcgatctggttgatgcgatgatccagggcgcagacccgaaagtatctgactcccagagcgatcaggttgaacgttccgcgtgtccgacctgcggttcctgctccgggatgtttaccgctaacagtatgaactgcctgaccgaagcgctgggcctgagccagccgggcaacggcagcctgctggcaacccacgccgaccgtaagcagctgttccttaatgctggtaaacgcattgttgaattgaccaaacgttattacgagcaaaacgacgaaagtgcactgccgcgtaatatcgccagtaaggcggcgtttgaaaacgccatgacgctggatatcgcgatgggtggaagcactaacaccgtacttcacctgctggcggcggcgcaggaagcggaaatcgacttcaccatgagtgatatcgataagctttcccgcaaggttccacagctgtgtaaagttgcgccgagcacccagaaataccatatggaagatgttcaccgtgctggtggtgttatcggtattctcggcgaactggatcgcgcggggttactgaaccgtgatgtgaaaaacgtacttggcctgacgttgccgcaaacgctggaacaatacgacgttatgctgacccaggatgacgcggtaaaaaatatgttccgcgcaggtcctgcaggcattcgtaccacacaggcattcagccaagattgccgttgggatacgctggacgacgatcgcgccaatggctgtatccgcagcctggaacacgcctacagcaaagacggcggcctggcggtgctctacggtaactttgcggaaaacggctgcatcgtgaaaacggcaggcgtcgatgacagcatcctcaaattcaccggcccggcgaaagtgtacgaaagccaggacgatgcggtagaagcgattctcggcggtaaagttgtcgccggagatgtggtagtaattcgctatgaaggcccgaaaggcggtccggggatgcaggaaatgctctacccaaccagcttcctgaaaagtatgggtctcggcaaagcctgtgcgctgatcaccgacggtcgtttctctggtggcacctctggtctttccatcggccacgtcagtccggaagcggcaagcggcggcagcattggcctgattgaagatggtgacctgatcgctatcgacatcccgaaccgtggcattcagttacaggtaagcgatgccgaactggcggcgcgtcgtgaagcgcaggacgctcgaggtgacaaagcctggacgccgaaaaatcgtgaacgtcaggtctcctttgccctgcgtgcttatgccagcctggcaaccagcgccgacaaaggcgcggtgcgcgataaaagcaaactggggggttaataatggctgacagccaacccctgtccggtgctccggaaggtgccgaatatttaagagcagtgctgcgcgcgccggtttacgaggcggcgcaggttacgccgctacaaaaaatggaaaaactgagcagccgtcttgataacgtcattctggtgaagcgcgaagatcgccagccagtgcacagctttaagctgcgcggcgcatacgccatgatggcgggcctgacggaagaacagaaagcgcacggcgtgatcactgcttctgcgggtaaccacgcgcagggcgtcgcgttttcttctgcgcggttaggcgtgaaggccctgatcgttatgccaaccgccaccgccgacatcaaagtcgacgcggtgcgcggcttcggcggcgaagtgctgctccacggcgcgaactttgatgaagcgaaagccaaagcgatcgaactgagtcagcagcaggggttcacctgggtgccgccgttcgaccatccgatggtgattgccgggcaaggcacgctggcgctggaactgctccagcaggacgcccatctcgaccgcgtatttgtgccagtcggcggcggcggtctggctgctggcgtggcggtgctgatcaaacaactgatgccgcaaatcaaagtgatcgccgtagaagcggaagactccgcctgcctgaaagcagcgctggatgcgggtcatccggttgatctgccgcgcgtagggctatttgctgaaggcgtagcggtaaaacgcatcggtgacgaaaccttccgtttatgccaggagtatctcgacgacatcatcaccgtcgatagcgatgcgatctgtgcggcgatgaaggatttattcgaagatgtgcgcgcggtggcggaaccctctggcgcgctggcgctggcgggaatgaaaaaatatatcgccctgcacaacattcgcggcgaacggctggcgcatattctttccggtgccaacgtgaacttccacggcctgcgctacgtcagtgaacgctgcgaactgggcgaacagcgtgaagcgttgttggcggtgaccattccggaagaaaaaggcagcttcctcaaattctgccaactgcttggcgggcgtagcgtcaccgagttcaactaccgttttgccgatgccaaaaacgcctgcatctttgtcggtgtgcgcctgagccgcggcctcgaagagcgcaaagaaattttgcagatgctcaacgacggcggctacagcgtggttgatctctccgacgacgaaatggcgaagctacacgtgcgctatatggtcggcggacgtccaagccatccgttgcaggaacgcctctacagcttcgaattcccggaaagtccgggcgcgctgctgcgcttcctcaacacgctgggtacgtactggaacatttctttgttccactatcgcagccatggcaccgactacgggcgcgtactggcggcgttcgaacttggcgaccatgaaccggatttcgaaacccggctgaatgagctgggctacgattgccacgacgaaaccaataacccggcgttcaggttctttttggcgggttaaggaaaaatgcctgatagcgcttcgcttatcaggcctacccgcgcgacaacgtcatttgtggttcggcaaaatcttccagaatgcctcaattagcggctcatgtagccgctttttctgcgcacacacgcccagctcaaacggcgttttctcatcgctgcgctctaaaatcatcacgcggttacgcaccggttcggggctgttttccagcaccacttccggcaacaatgccacgccacagccgagtgccaccatgcttaccatcgcttcatgcccgccaaccgtggcgtaaatcatcgggttactgattttattgcgtcgaaaccacagttcaatgcggcggcgtaccggcccctgatcggccataataaacggcaccgtactccagtccggcttctctacgctcacctgattacgcaccgggcagggcagcgcgggggcaatcagcactactgccagattctccagcatgctaaacgccactgcgccgggcaaggtttccggtttacccgcaatcgccagatccgcttcaccagtgaccaccttttccatcgcatctgccgcatcaccagtagtaagtttaatctccacgctcgggtgttccgcgcggaagcgatccagaatcggcggcagatggctgtaggcagcggtcacgctgcagaagatatgtaattcgccagagaggctcggcccttgctgatcgatggtgtggcgcaactgctgatactgcaacagcgtttgctgggcgaaaacgcgcagctcttcgcccgcttcagtcagcgtcaccgtgcggttatcgcgcacaaacagcggctgaccgagatcttcttccaggcgctgaatctgccgactgagcgtggatgggctaacgtgcatcgcccgcgcgctgcggccaaaatggcggctttccgccagatgcaggaaggttttcagatcgcgtaaatccacagggacagccctcgatgttgacgttgcaaaaattgcaatgtgacgttgtgaatatatcaatttccgcaataaatttcctgtcatatagtgaattcaatctcgcaaacgcgaaccgaacaataagaagcacaacatcacgaggaatcaccatggctaactacttcaatacactgaatctgcgccagcagctggcacagctgggcaaatgtcgctttatgggccgcgatgaattcgccgatggcgcgagctaccttcagggtaaaaaagtagtcatcgtcggctgtggcgcacagggtctgaaccagggcctgaacatgcgtgattctggtctcgatatctcctacgctctgcgtaaagaagcgattgccgagaagcgcgcgtcctggcgtaaagcgaccgaaaatggttttaaagtgggtacttacgaagaactgatcccacaggcggatctggtgattaacctgacgccggacaagcagcactctgatgtagtgcgcaccgtacagccactgatgaaagacggcgcggcgctgggctacagccacggtttcaacatcgtcgaagtgggcgagcagatccgtaaagatatcaccgtagtgatggttgcgccgaaatgcccaggcaccgaagtgcgtgaagagtacaaacgtgggttcggcgtaccgacgctgattgccgttcacccggaaaacgatccgaaaggcgaaggcatggcgattgccaaagcctgggcggctgcaaccggtggtcaccgtgcgggtgtgctggaaagctccttcgttgcggaagtgaaatctgacctgatgggcgagcaaaccatcctgtgcggtatgttgcaggctggctctctgctgtgcttcgacaagctggtggaagaaggtaccgatccagcatacgcagaaaaactgattcagttcggttgggaaaccatcaccgaagcactgaaacagggcggcatcaccctgatgatggaccgtctctctaacccggcgaaactgcgtgcttatgcgctttctgaacagctgaaagagatcatggcacccctgttccagaaacatatggacgacatcatctccggcgaattctcttccggtatgatggcggactgggccaacgatgataagaaactgctgacctggcgtgaagagaccggcaaaaccgcgtttgaaaccgcgccgcagtatgaaggcaaaatcggcgagcaggagtacttcgataaaggcgtactgatgattgcgatggtgaaagcgggcgttgaactggcgttcgaaaccatggtcgattccggcatcattgaagagtctgcatattatgaaagtctgcacgagctgccgctgattgccaacaccatcgcccgtaagcgtctgtacgaaatgaacgtggttatctctgataccgctgagtacggtaactatctgttctcttacgcttgtgtgccgttgctgaaaccgtttatggcagagctgcaaccgggcgacctgggtaaagctattccggaaggcgcggtagataacgggcaactgcgtgatgtgaacgaagcgattcgcagccatgcgattgagcaggtaggtaagaaactgcgcggctatatgacagatatgaaacgtattgctgttgcgggttaagtgcgcgctgatgccctcaccccgaccctctcccacagggagagggagaaaacactcaaggccttctcctggagaaggccttgctattagttgcggtacagcaccttaatgatgtgatatccgaactgggtgtgcagcgggccggtcggctccagtaccggacaagagaaaaccactttatcgaacgccggaaccatctgaccctggcggaattcacctaaatcaccgccgcgtttgccacttgggcaaatggagtgtttcttcgccagcttgccgaaatcggccccgttcttaatctgctcgagaagatccagagccagtttctcttcttttacaaggatatgcagtgctgctgctgtttttgccatgatcgtgccttgagtgaataattgtcaggcggcgattttagcatgatccgcagatgctaacgtaattgtcagtcagggagtggctggtacatatatggcaaaagcccggaaaatccgggcttcgcaggtccctcaaggggagaaaacttagggcctctatgggctacaaagtcattatcggggatggttattttattgtcaatttatgaggcttatggcattgatactcttgatgaccgccctctgtatgtctgcaaccaactcatgtggcaaacattgattaagataccctctgtaagtccttgctctgtttaatctgtttcgactgacttgttgtaccaggtcggctttggcccaacgaatctgctgatcaaagaattgcaggtcattgataacattactggctatttcaacatgcattccacgttttaacttgtctggtcggctgtggttgataatggaacgacgatgcatgcgttgccattaatttttccgttgagcacgacaactaacctgttttttatcatttcaggaggaatgcggccatcgtaatacgtcgtgctgaacggtccattttggctaacaggatagttaccaaagttgcattccagtatttcaccaaccttagggctgaaattaatcgccacgagtaaacctctccttagtaaactctgaaaaagtaataacacaacgttacgacccgatattttctaagtctaatggattcacgatgaactccgatttcggtcttctctctctgatttaaacatccgcagccaaccggttagcggcttacacgcggtcacattcaaatgcgattctgctacaatcctccccccgttcgaagattgagcaatacacctatgcgtctaaaccccggccaacaacaagctgtcgaattcgttaccggcccctgcctggtgctggcgggcgcgggttccggtaaaactcgtgttatcaccaataaaatcgcccatctgatccgcggttgcggttatcaggcgcggcacattgcggcggtgacctttactaataaagcagcgcgcgagatgaaagagcgtgtagggcagacgctggggcgcaaagaggcgcgtgggctgatgatctccactttccatacgttggggctggatatcatcaaacgcgagtatgcggcgcttgggatgaaagcgaacttcagcttgtttgacgataccgatcagcttgctttgcttaaagagttgaccgaggggctgattgaagatgacaaagttctcctgcaacaactgattagcaccatctctaactggaagaatgatctcaaaacaccgtcccaggcggcagcaagtgcgattggcgagcgggaccgtatttttgcccattgttatgggctgtatgatgcacacctgaaagcctgtaacgttctcgacttcgatgatctgattttattgccgacgttgctgctgcaacgcaatgaagaagtccgcaagcgctggcagaacaaaattcgctatctgctggtggatgagtatcaggacaccaacaccagccagtatgagctggtgaaactgctggtgggcagccgcgcgcgctttaccgtggtgggtgacgatgaccagagcatctactcctggcgcggtgcacgtccgcaaaacctggtgctgctgagtcaggattttccggcgctgaaggtgattaagcttgagcagaactatcgctcttccgggcgtattctgaaagcggcgaacatcctgatcgccaataacccgcacgtctttgaaaagcgtctgttctccgaactgggttatggcgcggagctaaaagtattaagcgcgaataacgaagaacatgaggctgagcgcgttactggcgagctgatcgcccatcacttcgtcaataaaacgcagtacaaagattacgccattctttatcgcggtaaccatcagagccgggtgtttgaaaaattcctgatgcaaaaccgcatcccgtacaaaatatctggtggtacgagctttttctctcgtcctgaaatcaaggacttgctggcttatctgcgcgtgctgactaacccggacgatgacagcgcatttctgcgtatcgttaacacgccgaagcgagagattggcccggctacgctgaaaaagctgggtgagtgggcgatgacgcgcaataaaagcatgtttaccgccagctttgatatgggcctgagtcagacgcttagcggacgtggttatgaagcattgacccgcttcactcactggttggcagaaatccagcgtctggcggagcgggagccgattgccgcggtgcgtgatctgatccatggcatggattatgaatcctggctgtacgaaacaagccccagcccgaaagccgccgaaatgcgcatgaagaacgtcaaccaactgtttagctggatgacggagatgctggaaggcagtgaactggatgagccgatgacgctcacccaggtggtgacgcgctttactttgcgcgacatgatggagcgtggtgagagtgaagaagagctggatcaggtgcaactgatgactctccacgcgagcaaagggctggagtttccttatgtctacatggtcggtatggaagaagggtttttgccgcaccagagcagcatcgatgaagataatatcgatgaggagcggcggctggcctatgtcggcattacccgcgcccagaaggaattgacctttacgctgtgtaaagaacgccgtcagtacggcgaactggtgcgcccggagccgagccgctttttgctggagctgccgcaggatgatctgatttgggaacaggagcgcaaagtggtcagcgccgaagaacggatgcagaaagggcaaagccatctggcgaatctgaaagcgatgatggcggcaaaacgagggaaataatcaaggccggaaaagatgcgtcagcatcgcatccggcacttactcattaatgcacttccagcggccagtggacatagctctgccactggctttcctgagcaataatctctttacccagcggatgttgggttagccaaccttgcggaagcgtcaaggtcaacagttcatggttagcctgtaatgtcatctctggcacgagatcgtcacggcgacggctggcaaaaatgatggccaggcgtagtaaacggcagagttgttctgcgacgcgcggcggtacggcattttgctgatgcaggctactgagatcgaccggattagtctggttgagcagtagcgtcgccagcaattttttctgtgcgggggtaaaaccgggaagatccagattacgcaccagataagcagcgtgttgcggcgcttgtttgaagtcaacgctcaggccgatttcatgaagctgacaggcgctgatgagcaaatcgcggcttattgcttcaagatgccattcgttttccacctgatcgaagaagttagccgcaactttggctacgcgctgtgcctgatcaatatcgatcataaagcggcgttgaatattacgcagcgtacggctgcgaatatcctgctcgacggccagatgcaacatgccgtagaccaggccttcacgcagcgcaccgcccgccagggtcatacactgaatattcagttcggtaaaaatggcgatcaggatcgccagaccactcgggaacactaacgcacgttccagcgtcagcccgtcaatctccagttcctccagccgaccgcaatgaatggctcgctgtttcaattgctgcaacttttccagggtaatgcgttcatccatcccctgtgccatcatgatttcctgtaacgcctgcacggtgccggaagcaccaacgcacactttccagccgtgataccgtaattcatcggcaaccggacgtaacacttcgcgtgccgctttttctgcagcatcaaaattttcctgccccagattacgatcggcaaaatagcgttccagccaggtgacgcagcccatgctcaggctgaacaagctggtggtttgtgcacccgtgccggttaccagttcagtactggctccgcctatatccaccaccaggcgctgatcggcaccaccagtggtgtgagcaacgccctgataaatcagacgtgcttcctcttcaccgctgatcacctgtaccggacaaccgagaatttcctgcgctttggcaataaaatcacccgcattgacggcaaggcgtaacgtcgccgtagcgacaacgcgaatttggctgggaggaatatcttgcagacgttcagcaaacaggcgcaaacattgccaaccgcgctccattgcttcattggagagggcattttcgctattcaggccagcagccagacgcactttgcgttttattcgcgtcagcgtctggatgcttccagccacctcgcgcacaaccagcatatgaaaactattgctaccgagatcaatggctgcatacaggctgctggtggaacccatactcttcatccttcaatctgtctctgtgttggctgcattctttcacctgaatcacttactacagtaagctcatcgggattcattctcttgccatcttgatacagtttgaatgattttgagtatgacattttttatttaaccactacgacgacgattacgcggagcgccagtacgacgcggaccattgcctgtgcgcgggcgcgtgaggcgcagcggttttggcagatcggtcatcaatgcgtccggattgtatttgcttaccggaatactgtgaccaatataggtctcaatagcaggcaaattcaatgcatactcttcacacgccaggctgatagagtgaccgcttgcgcctgcgcgacctgtacgaccaatacggtgaacgtaatcttcacagtcatcgggtaaatcgtagttaaagacgtgcgtcactgccggaatatgcaaaccacgcgcggcaacgtcggtggcaaccagaatatccagatcgccacgggtaaattcatcaagaatacgcagacgttttttctgcgcgacatcgcctgtcaataaaccgacacgatgaccatctgctgccaggtggccccagatctcttcacaacggtgtttggtgttggcgaaaataatcgctctgtctggccactcttcttcgatcagcgtttgcagcaaacgcattttttcttcgttagaagggtagaaaagctcttctttaatacggtggcccgttttctgttccggttccacttcaatatattcggcattgttcatctgctcgaacgccagttcacgtacccggtagctaagcgtggcggagaacagcatgttgaggcgctggtttgcaggcggcatacggcggaacagccagcggatatctttaataaagcccagatcgtacatgcgatcggcttcgtccagtaccaccacctgaatggcaccgaggttaatgtggttctgcttggcgtagtcaattaaacgccccgtggtgccaatcagaatgtcaacgccgctttccagcactttcagctgtttgtcgtagccatcaccaccgtaagccagacccagcttcaggccagtagcttccgccagcggttctgcgtcggcatggatctgcacggcaagttcacgcgtcggtgccataattaaggcacgcggctgattcaccttgcgatcggcaatcgcaggatgagagagaagataatgaaacgtactcgtaagaaacgccatcgttttcccggtaccggtttgcgcctgcccggctacgtcacgacccgccagcgtcagcggaagggccagtgcctgaatgggcgtacagttatgaaacccttttttttcaagggcttctacaaccttcggatgcagggcgaagtcggaaaacttctgttctgttaaatgtgttttgctcatagtgtggtagaatatcagcttactattgctttacgaaagcgtatccggtgaaataaagtcaacctttagttggttaatgttacaccaacaacgaaaccaacacgccaggcttattcctgtggagttatatatgagcgataaaattattcacctgactgacgacagttttgacacggatgtactcaaagcggacggggcgatcctcgtcgatttctgggcagagtggtgcggtccgtgcaaaatgatcgccccgattctggatgaaatcgctgacgaatatcagggcaaactgaccgttgcaaaactgaacatcgatcaaaaccctggcactgcgccgaaatatggcatccgtggtatcccgactctgctgctgttcaaaaacggtgaagtggcggcaaccaaagtgggtgcactgtctaaaggtcagttgaaagagttcctcgacgctaacctggcgtaagggaatttcatgttcgggtgccccgtcgctaaaaactggacgcccggcgtgagtcatgctaacttagtgttgacttcgtattaaacataccttattaagtttgaatcttgtaatttccaacgcttcccgttttatcttaaatgcgaagtgaacagatttctggcagcagtctcaatccgtcttgtcgtttcagttctgcgtactctcctgtgaccaggcagcgaaaagacatgagtcgatgaccgtaaacaggcatggatgatcctgccataccattcacaacattaagttcgagatttaccccaagtttaagaactcacaccactatgaatcttaccgaattaaagaatacgccggtttctgagctgatcactctcggcgaaaatatggggctggaaaacctggctcgtatgcgtaagcaggacattatttttgccatcctgaagcagcacgcaaagagtggcgaagatatctttggtgatggcgtactggagatattgcaggatggatttggtttcctccgttccgcagacagctcctacctcgccggtcctgatgacatctacgtttcccctagccaaatccgccgtttcaacctccgcactggtgataccatctctggtaagattcgcccgccgaaagaaggtgaacgctattttgcgctgctgaaagttaacgaagttaacttcgacaaacctgaaaacgcccgcaacaaaatcctctttgagaacttaaccccgctgcacgcaaactctcgtctgcgtatggaacgtggtaacggttctactgaagatttaactgctcgcgtactggatctggcaagtcctatcggtcgtggtcagcgtggtctgattgtggcaccgccgaaagccggtaaaaccatgctgctgcagaacattgctcagagcattgcttacaaccacccggattgtgtgctgatggttctgctgatcgacgaacgtccggaagaagtaaccgagatgcagcgtctggtaaaaggtgaagttgttgcttctacctttgacgaacccgcatctcgccacgttcaggttgcggaaatggtgatcgagaaggccaaacgcctggttgagcacaagaaagacgttatcattctgctcgactccatcactcgtctggcgcgcgcttacaacaccgttgttccggcgagtggtaaagtgttgaccggtggtgtggatgccaacgccctgcatcgtccgaaacgcttctttggtgcggcgcgtaacgtggaagagggcggcagcctgaccattatcgcgacggcgcttatcgataccggttctaaaatggacgaagttatctacgaagagtttaaaggtacaggcaacatggaactgcacctctctcgtaagatcgctgaaaaacgcgtcttcccggctatcgactacaaccgttctggtacccgtaaagaagagctgctcacgactcaggaagaactgcagaaaatgtggatcctgcgcaaaatcattcacccgatgggcgaaatcgatgcaatggaattcctcattaataaactggcaatgaccaagaccaatgacgatttcttcgaaatgatgaaacgcagttaaatttgtcttatgccaaaaacgccacgtgtttacgtggcgttttgcttttatatctgtaatcttaatgccgcgctggcgatgttaggaaaattcctggaatttgctggcatgttatgcaatttgcatatcaaatggttaatttttgcacaggactggtgggtttggaacggactttcccttctgaataaaggtcttcgtggttatacttctgctaataattttctctgagagcatgcattgtgaatttactgacagtgagtactgatctcatcagtatttttttattcacgacactgtttctgttttttgcccgtaaggtggcaaaaaaagtcggtttagtggataaaccaaacttccgcaaacgtcaccagggattgatacctctcgttggggggattagcgtttacgcagggatttgcttcacgttcggaattgtcgattactatattccgcatgcatctctctatctcgcttgtgccggtgtgcttgttttcattggcgcgctggatgaccgttttgatatcagcgtaaaaatccgtgccaccatacaggccgctgttggcattgttatgatggtgttcggcaagctttatctcagtagcctgggttatatctttggctcctgggagatggtgctcggaccgtttggttacttcctgacgctatttgccgtctgggcggccattaatgcgttcaacatggttgatggcattgatggcttgctgggcgggttgtcctgcgtcagctttgcagcaatcggtatgattttgtggttcgacgggcaaaccagcctcgcaatctggtgctttgcgatgatcgccgccatcctgccatacatcatgcttaaccttggtatcctgggtcgccgctacaaagtctttatgggtgatgcgggcagtacgctgattggttttaccgttatctggatcctgctcgaaacgacccagggcaaaacccatcccatcagcccggttaccgctttgtggataatcgccattccgctaatggatatggtggcgattatgtaccgtcgcctgcgtaaaggcatgagcccattctctcctgaccgtcagcatattcaccatttgatcatgcgtgccgggtttacttcccgtcaggcgtttgtgctgattacccttgccgcagcactgctcgcttccattggcgtgctggcagaatattctcattttgtcccggagtgggtcatgctggtgctctttttgctagcattcttcctctatggatattgcattaagcgtgcctggaaagttgctcgctttattaagcgcgtaaaacgcagactgcgtagaaatcgtggtggcagccccaatttaaccaaataaatgaggatgtgatgacacaaccaatgcctgggaaaccggccgaagacgctgaaaatgaactggatattcgtgggttgtttcgtaccttgtgggctgggaagctatggattattggcatggggctggcgtttgcgttaatcgcgctggcgtatacgttttttgctcgtcaggagtggagcagcacggcgattaccgatcgtccaacggtgaatatgctggggggatattacagccagcagcaatttttgcgtaacctggatgtccgtagtaacatggcttctgccgaccaaccaagcgtcatggacgaagcctataaagagtttgttatgcaactggccagctgggatacccgcagagagttctggctgcaaaccgactattacaaacagcggatggtgggcaacagcaaagccgatgcggcgttgctggatgaaatgattaacaacatccagtttatccccggagactttacccgcgcggtcaatgacagcgtgaagcttattgccgaaaccgcgcctgacgctaataacctgttacgtcagtatgttgcttttgccagccagcgtgcagccagccatctgaatgatgagctgaaaggcgcatgggcggcgcgtaccatccagatgaaagctcaggtgaagcgtcaggaagaggtggcgaaagccatctacgaccgccggatgaacagcattgagcaggcgctgaaaattgctgagcagcataatattagccgcagtgcgacagatgtacctgccgaggaattacctgatagtgaaatgttcctgcttgggcgtccaatgcttcaggctcgactggaaaatttacaggccgtcggtccggcctttgatctcgactatgatcagaatcgggccatgttaaacaccctgaatgttggtccaaccctggatccgcgttttcagacctatcgctatttgcgtacgccggaagaaccggtaaaacgcgatagcccacgtcgtgccttcctgatgattatgtggggcattgtcggggggctgatcggggctggtgtcgcattaacccgccgttgcagcaaataacaacactgctgcggtgagcgcaaaggcgctcgccgcttattcgaagagaatcgatgtgaaagtactgactgtatttggtacgcgcccggaagccatcaagatggcgccgttggtgcatgcgttggcaaaagatcctttttttgaggctaaagtttgcgtcactgcgcagcatcgggagatgctcgatcaggtgctgaaactcttttccattgtacctgactacgatctcaacataatgcagccaggacagggcctgacagagataacctgtcggattctggaagggctaaaacctattcttgccgagttcaaaccagacgtcgtgctggttcacggcgatacgacgacgacgctggcaaccagcctggcggcgttttatcagcgtattcctgttggtcacgttgaggctggtctgcgcacgggcgatctctatagcccgtggccggaagaggctaaccgtacattgaccgggcatctggcgatgtatcacttctctccaaccgaaacttcccggcaaaacttgctgcgtgaaaacgttgcggatagccgaatcttcattaccggtaatacagtcattgatgcactgttatgggtgcgtgaccaggtgatgagcagcgacaagctgcgtagtgaactggcggcaaattacccgtttatcgaccccgataaaaagatgattctggtgaccggtcacaggcgtgagagtttcggtcgtggctttgaagaaatctgccacgcgctggcagacatcgccaccacgcaccaggacatccagattgtctatccggtgcatctcaacccgaacgtcagagaaccggtcaatcgcattctggggcatgtgaaaaatgtcattctgatcgatccccaggagtatttaccgtttgtctggctgatgaaccacgcctggctgattttgaccgacagtggcggcattcaggaagaagcgcctagcctggggaaacctgtgctggtgatgcgcgataccactgagcgtccggaagcggtgacggcgggtacggtgcgtctggtaggcacggataagcagcgaattgtcgaggaagtgacgcgtcttttaaaagacgaaaacgaatatcaagctatgagccgcgcccataacccgtatggtgatggtcaggcatgctctcgcattctggaagcgttaaaaaataatcggataagtctatgagttttgcgaccatttctgttatcggactgggttatatcgggctgccaacggcagcagcgtttgccagtcggcaaaaacaggtaattggtgtcgatatcaaccaacatgcggttgataccatcaatcgtggcgaaatccatatcgtcgaacctgatttggcgagtgtagtaaaaactgccgtagaaggcggttttttacgagcgagcacgacgccagttgaagcggatgcctggctgattgctgtacccacgccgtttaagggcgatcatgagccagatatgacctacgttgaaagcgctgctcgctccattgcgccagtgctgaaaaaaggcgcgctggtgatccttgaatccaccagcccggtggggagtaccgagaagatggcagaatggttagcagagatgcgtccggatctcactttcccgcagcaggtgggcgagcaggcggacgtcaacattgcttactgcccggaacgcgtgttaccaggacaggtaatggtcgagctgattaaaaacgatcgcgtgattggtggtatgacgccggtttgtagcgcccgcgccagcgaactgtacaaaattttcctcgaaggtgagtgtgtcgtcactaacagccggacggcggaaatgtgtaagctcaccgaaaacagcttccgcgatgtgaatatcgcttttgctaatgaattgagcctgatttgtgccgatcaggggattaacgtctgggaactgattcgcctggcgaatcgtcaccctcgcgttaatattcttcagcctggccctggcgtgggcggtcactgcattgctgttgatccgtggtttatcgtggcacagaacccccagcaggcgcggcttatccgtaccgcgcgcgaagtgaacgatcacaaaccgttctgggttatcgatcaggtgaaagcggcggtggctgattgcctggcggctaccgataaacgcgccagtgaactgaaaatcgcctgctttggtctggcgtttaaaccgaatattgatgacctgcgcgaaagcccggcgatggaaatcgctgaactgatcgcccagtggcatagcggcgaaactctggttgttgagcctaacatccaccagttgccgaaaaaactgaccgggctttgtactctggcgcagcttgacgaggcgctggcaacggcagacgtgctggtgatgctggtcgatcatagtcagttcaaagttatcaatggcgacaatgtccatcagcagtatgtcgtcgatgccaaaggagtctggcgctgatgagaaaaattctgataacaggtggtgccgggtttattggcagcgcgctggtgcgttatatcatcaacgaaacgagcgacgcggtggtagtggtcgataagctgacctacgccggaaacctgatgagcctggcaccggtcgcgcaaagcgagcgctttgcctttgagaaagttgatatctgcgatcgggcagaactggcacgcgtattcactgagcatcagccagactgtgtcatgcatctggcagccgaaagccatgttgaccgttctattgacggcccggcagcgtttattgaaaccaacattgtcgggacttatacattgcttgaagcggcgcgggcttactggaatgcgctgacggaagataaaaaaagtgcgttccgttttcatcatatctccactgacgaagtatatggtgacctgcacagcacggatgatttcttcaccgaaaccacgccgtatgcgccgagcagcccttattccgcgagtaaagccagcagcgaccatctggtgcgcgcctggctgcggacctatggtctgccgacgcttatcaccaactgcagcaataactacggcccttaccactttccggaaaaactgatcccgctgatgatcctcaacgcgctggcgggtaaaagcctgccggtatatggcaacgggcagcaaatccgtgactggctgtatgtggaagatcacgcccgcgcgctgtattgcgtggcgaccaccgggaaagtcggtgaaacctataatattggtggtcacaacgagcgtaagaatctcgatgttgtggaaaccatttgcgagctgctggaagaactggctccgaacaagccgcacggcgtggcgcactatcgtgacctgatcacctttgtcgctgaccgtccggggcatgatctgcgttatgccattgatgctagcaaaattgcccgtgaacttggctggctgccgcaggaaacctttgaaagtggaatgcgtaaaacggttcagtggtatctggctaatgaaagctggtggaagcaggtgcaggacggcagctatcagggcgagcgtttaggtctgaaaggctaattttcagcggaggcaaacatgaaaggtattatcctggcgggcggttccggcacccgattgcatccgattacgcgcggcgtaagcaagcaactgttgccgatttacgataagccaatgatttactatccgctgagcgtgctgatgctggccggtatccgcgaaattctcatcatcactacgccggaagataaaggttatttccagcgcctgctgggcgatggtagtgagttcggtatccagctggaatatgccgaacagcccagcccggacggtctggcgcaggcctttatcatcggtgaaaccttccttaatggtgaaccttcttgtctggtgctgggcgataacatcttcttcggtcagggcttcagtccgaagctgcgtcatgttgcggcgcgcaccgaaggggcgacggtttttggctatcaggtgatggacccggaacgctttggcgtggtggagtttgacgacaatttccgcgctatcagcctggaagaaaagccaaaacagccgaagagtaactgggcggtgaccgggctttatttctacgacagtaaagtcgtggagtacgcaaagcaggtgaagccgagcgagcgtggtgaactggagattacctccatcaaccagatgtacctcgaggcgggcaacctgaccgttgaactgctcgggcgcggatttgcctggctggataccggcactcacgacagcctgattgaagccagcacctttgtacagacggtggaaaaacgccagggctttaagattgcctgcctggaagagattgcctggcgtaacggctggctcgatgacgagggtgtgaagcgtgctgccagtagtttagcgaaaactggctacggccaatatctgctggagttacttcgtgcccgtccgcgccagtattgagccactaacctgggaaaacgccttctttggtgttaacagcgccatcgtgcgcattacgtctgaagcaccgctcctgacgccagacgcgttagcgccgtggtcacgggtgcaggccaaaattgcggcaagtaatacgggtgaactggatgccctgcaacagctgggattctccctggtagaaggtgaagttgatttggcgctacccgtgaacaatgccagtgatagcggtgctgtagtggcacaagagaccgatattcccgcattacgtcagttagccagcgccgcatttgcgcaaagccgttttcgtgcgccgtggtatgcgcctgacgccagcagtcgcttttatgcacagtggattgaaaatgccgtgcgcggcacctttgatcatcaatgtctgattttacgtgcggcgtccggcgatattcgcggctatgtctctttacgggaactcaatgcgacagatgcgcgaattggcctgctggctggacgcggtgcaggtgctgagctgatgcaaacggcgctaaactgggcgtatgctcgcggtaaaacaactttgcgggtggcgacccaaatgggcaacaccgccgcgcttaaacgatacatacaaagtggtgcgaatgtagaaagcaccgcgtactggttatacaggtgatcacatgattccatttaacgcaccgccggtggtgggaaccgaactcgactatatgcagagcgcaatgggtagcggcaaactgtgtggcgatggcggttttacccgtcgctgccagcagtggctggagcaacgttttggcagcgccaaagtgttactgacgccgtcctgcaccgctagcctggagatggcggcgctgctgctcgatatccagcctggcgatgaagtgatcatgccgagctacacctttgtctccaccgccaatgcctttgtgctgcgtggcgcaaaaatcgtttttgtggatgttcgcccggacaccatgaacatcgacgaaacgctgattgaagcggcgatcaccgacaaaacgcgcgttatcgtgccggtccattacgcgggtgtggcctgcgaaatggacaccattatggcgttggcgaaaaagcataatttgtttgtggtagaagatgccgctcagggcgtgatgtccacttacaaagggcgtgcactgggaaccattggtcatattggctgctttagcttccatgaaaccaaaaactacacggcgggcggtgaaggcggcgcgacgctgattaacgataaagcgttaatcgaacgagccgagatcatccgtgaaaagggcactaaccgcagccagttcttccgtggtcaggtcgataaatatacctggcgcgatattggctccagctatttgatgtccgatctgcaagctgcatacctgtgggcgcaactggaagcagcggatcgtatcaaccagcaacgtctggcgctgtggcaaaactactacgatgcgttagcgcctctggcgaaagccgggcgtatcgagctgccgagcattcccgatggctgcgtgcagaacgcgcatatgttctacattaaactgcgggatattgatgaccggagcgcgttgattaactttctgaaagaagcggaaatcatggcggtgtttcattacattccgctgcacggttgccctgcgggggaacactttggtgagttccacggtgaagatcgctacaccaccaaagagagcgagcgcctgctgcgcctgccgctgttctacaacctgagccccgtcaatcagcgtacggtaattgcgactttgttgaactacttttcctgatatgagcttggcaaaagcgtccttgtggacggcggccagtacactggtcaagattggtgccgggttactggtcggtaagttgctggcggtgagttttggtccggcggggcttgggctggcggcaaatttccgccagttgattaccgtgctcggcgtgcttgccggggctggcatctttaacggtgtaaccaaatacgttgcccagtaccatgataatccgcaacagctgcgccgcgtggtcggcactagtagtgcgatggtacttggtttctctacgctgatggcgctggtttttgtgctggcagctgcgccaatcagccagggattgtttggtaataccgactatcaggggctggtgcgtttagtggcgctggtgcaaatggggatcgcctggggcaacctgttactggcgctgatgaaaggctttcgcgatgccgcaggtaatgcgttaagcctgattgtcggcagcttgattggcgttctcgcgtactacgtcagttaccgtttgggcggttatgaaggggcgttgctgggtctggcgctgattcccgcgctggtggtaattcctgccgccatcatgttgatcaaacgtggtgtcatcccgttaagctatctgaaacccagctgggataacggtctggcagggcagttgagcaaatttacgctcatggcgttgattacgagcgtgaccttgcctgttgcttacatcatgatgcgtaaactgctggcggcgcagtatagctgggatgaggtggggatctggcaaggggtgagcagtatttccgatgcctacctgcaatttattacggcaagcttcagcgtatatttgctgcccacgttgagccggctaacggaaaagcgcgatatcacccgggaagtggttaaaagcctgaaattcgtcttaccggcagtggcggcggcgagttttaccgtctggctgctgcgtgattttgctatctggctgctgttgagcaataaatttaccgctatgcgcgatctctttgcctggcagttagtgggtgatgtgttaaaagtgggcgcttatgtctttggttatctggtgatcgccaaagcgagtctgcggttttatattctggcggaagtcagccagttcactttattgatggtatttgcccactggctaatccctgcgcatggtgcactgggcgcggcgcaggcatatatggcaacttatatcgtctatttttctctttgttgtggcgtgtttttactctggcgtaggcgggcatgactgtactgattcacgtactgggaagcgatatccctcaccataaccgaaccgttttgcggtttttcaatgacgcgctggccgcgacgagcgagcacgcgcgcgagtttatggttgttggcaaggacgacggcttaagtgatagctgtccggcgctttctgtgcaatttttccctgggaaaaaaagcctggcggaagcggtcatcgcgaaagcaaaagctaaccgtcagcagcgttttttcttccacggtcagttcaatcccacactgtggctggctctgctgagtggtggcattaagcccagccagtttttctggcatatctggggggcagacctgtatgagctttccagtggcttgagatataagcttttttacccactacgtcgcctggcgcaaaagcgagtcggctgtgtatttgccacccgcggcgatttgagcttttttgccaaaacgcacccaaaggtgcggggcgaactgctgttcttcccgacgcggatggaccctagcctcaatacgatggcgaacgatcggcaacgtgaagggaaaatgaccattctggtggggaactccggcgaccgcagcaatgagcatattgctgccttgcgcgccgttcatcagcaatttggcgatacggtaaaagtggtggtgccgatgggatatccgcctaataacgaagcgtacattgaggaagttcgtcaggcggggctggagttattcagcgaagaaaatctacaaattctgagcgaaaaactggaatttgacgcctatctggcgctacttcgtcagtgcgatcttggttactttatttttgcccgccagcagggcattggtacgctgtgcttactgattcaggcgggcattccttgtgtgcttaaccgggaaaatccgttctggcaggatatgacggaacaacatttgccggtgctgtttactaccgacgatctcaacgaggatattgtgcgtgaagcgcagcgccagttggcgagcgtggataaaaacaccattgccttctttagccctaactatctacaaggctggcagcgggcgttggcgattgccgccagggaggtcgcatgagtctgctgcaattcagtggcctgtttgttgtctggctgctctgcacgctgtttattgccacgctgacctggtttgagtttcgccgtgtgcgctttaacttcaatgtcttctttagtttgctgtttttgctcacctttttcttcggcttcccgctgaccagcgtgctggtatttcgctttgatgttggtgtcgcgccgccagaaatcttgttgcaggcgttgctttctgcgggctgcttctacgcggtttactatgtcacctacaaaacccgcctacgcaaacgcgttgctgatgtaccgcgccgtccgctgtttaccatgaaccgcgtggagaccaatcttacgtgggtgatcctgatgggtatcgcgctggtaagcgtcggcatcttcttcatgcacaacggctttttgctgttccggcttaactcctacagtcagatcttttccagtgaagtctccggcgtggcgttaaaacgcttcttttactttttcatcccggcgatgctggtggtctactttctgcgccaggacagcaaagcgtggctgtttttcctcgtcagcacggtcgcctttggcttgctgacttatatgattgtcggcggcactcgcgccaatatcatcatcgcattcgctatcttcctgtttattggcattattcgcggctggattagcttgtggatgctggcggcggcgggcgtgctggggattgttggcatgttctggctggcactaaaacgctatggaatgaatgtgagcggcgatgaagcgttctatacgtttctctatctcactcgcgacaccttcagcccgtgggagaatctggcgttgctgttgcagaactacgacaacatcgacttccagggcctggctccaattgtccgcgatttctatgtctttatcccttcctggctgtggccgggtcgcccgagtatggtgctgaacagtgccaactactttacctgggaagtgctgaataaccactccggactggcgatcagccctacgcttataggcagtctggtggtgatgggcggcgcgttgttcatcccgctcggggcgatcgtggttggtctgatcatcaaatggttcgactggctgtatgagctgggcaaccgcgagcctaatcgctataaagctgcgatattgcacagtttctgctttggggcgatcttcaatatgatcgtgctggcgcgtgaagggctggatagctttgtcagtcgcgtggtcttttttatcgtggtcttcggcgcatgtctgatgatcgcaaaactgttgtactggctttttgaaagcgccggactcattcataaacgtacaaaaagtagcctccggacgcaggttgaaggataacaatgaataacaacaccacggcaccaacctatacgctgcgtggcttacagttgattggttggcgtgatatgcagcacgccctcgattatctgtttgctgacgggcagcttaagcagggaacgctggttgccattaatgctgaaaaaatgctgactattgaagataacgccgaggtcagggagttaattaacgctgccgaatttaaatatgcggatggcatcagcgttgtacgtagtgtacgtaaaaagtacccgcaggcgcaggtttcccgcgttgccggtgccgatctctgggaagagctgatggcgcgcgcaggcaaagaagggacgccggtatttcttgtgggcggtaaacctgaagtgctggcgcaaactgaagctaaactgcgcaaccagtggaatgtgaatatcgttggcagtcaggatggttattttaaacccgagcagcgtcaggcgctgtttgaacgcattcatgccagcggtgcgcaaatcgtcaccgttgcgatgggaagcccaaagcaggagatcatcatgcgcgactgccgtctggtacatccagatgcgctgtatatgggcgttggcgggacttacgatgttttcaccggtcacgtaaaacgcgcaccgaaaatctggcaaacgctggggctggagtggctctaccgcctgcttagccagccgagccgcattaagcgtcagcttcgtttgctgcgttatttacgctggcactacaccggcaacctatgattttcctctctttgtaaagcgacggagtggtcactccgtcgcctgtctgcttttttattacacaaagcattcaaatttttaatgctttatttgccatttctcctgaattacgaaaacatttgcaacactcgatgtacccataacgataaccggtaacaccggaaagcatgcaaacacaacacgaggatttatggcagataacaaaccagagctacagcgtgggctggaagctcgacatatcgaactcatcgccctggggggcaccattggcgtcggcctgtttatgggggccgccagtaccctgaaatgggccgggccatccgtattgttggcctatatcatcgccgggctgttcgtctttttcatcatgcgtagtatgggcgaaatgttgttcctcgaaccggttaccggtagcttcgccgtttatgcgcatcgttatatgagcccgttctttggctatctcaccgcctggtcttactggtttatgtggatggcggtggggatctctgaaatcaccgccattggcgtttatgtccagttctggttcccggagatggcgcagtggatacccgcattgatcgcagtggcgctggtggcgttggcgaatctggcggcggtgcggttgtacggcgaaatcgagttctggttcgcgatgatcaaagtcaccacgattatcgtgatgattgtcattggcctgggcgtgattttctttggctttggcaatggcgggcagagcattggttttagcaatctcacagagcatggcggtttctttgcgggtggctggaaagggttcctgaccgctctgtgtattgtggtggcgtcctaccagggcgtggagctgattggcattactgccggtgaagcgaagaatccgcaggtgacgctgcgcagtgccgtaggcaaggtgctgtggcggatcctgattttctacgtaggcgcgattttcgttatcgtcaccatcttcccgtggaatgaaataggcagcaacggcagcccgttcgtactgacttttgccaaaatcggtattaccgcagcggcgggcattatcaactttgtggtgctgacggctgcgctctctggctgtaacagcggcatgtacagttgcggacgtatgctctacgcactggcgaaaaaccgtcagttaccggcggcaatggcgaaagtttcccgtcacggcgtaccggttgcgggtgtggcagtatctattgctattctgctaattggcagttgcctgaactacatcattcccaatccgcagcgtgtgtttgtctacgtctacagtgccagcgtgcttccggggatggtgccatggtttgtgatattgataagccagctgcgttttcggcgtgcacataaagcggcgattgccagccatccgttccgcagtatcctgttcccgtgggccaattacgtaacaatggcattcctgatttgcgttttgatcggcatgtactttaatgaagatacgcgtatgagcctgtttgttggcatcatctttatgctggcggtgacggcgatttataaagtttttggccttaatcgccacgggaaagcgcataaactggaggaataagcagcaaaacgcacaaaccgtaaccaaacgcgcaatttatttaaaaagggactagacagaggggtgggaagtccgtattatccacccccgcaacggcgctaagcgcccgtagctcagctggatagagcgctgccctccggaggcagaggtctcaggttcgaatcctgtcgggcgcgccatttagtcccggcgcttgagctgcggtggtagtaataccgcgtaacaagatttgtagtggtggctatagctcagttggtagagccctggattgtgattccagttgtcgtgggttcgaatcccattagccaccccattattagaagttgtgacaatgcgaaggtggcggaattggtagacgcgctagcttcaggtgttagtgtccttacggacgtgggggttcaagtcccccccctcgcaccacgactttaaagaattgaactaaaaattcaaaaagcagtatttcggcgagtagcgcagcttggtagcgcaactggtttgggaccagtgggtcggaggttcgaatcctctctcgccgaccaattttgaaccccgcttcggcggggttttttgttttctgtgcatttcgtcaccctcccttcgcaataaacgcccgtaataactcattgccccacggtatgatttcgcccttaacgtattgaaggatgacttcaggcaaggagcgaccatgctgcaacaggttccaacgcgtgcttttcatgtgatggcgaaaccgagcggttccgattgtaatctgaactgtgactactgtttttatctcgaaaaacaatccctttaccgcgaaaagccagtcacgcatatggacgatgacacgctggaagcgtatgtccgtcactatatcgctgccagcgaaccgcaaaacgaagtggcttttacctggcagggcggcgaaccaacgctactcgggctggcgttttaccgccgtgccgtagcgctacaggcgaaatatggtgctggcaggaagataagtaacagcttccagactaacggcgtgctgctggatgacgaatggtgcgcgtttctcgcggagcatcattttcttgttggtttaagcctggatggcccgcctgagatccacaatcaatatcgcgtgactaaaggtggcagacccacgcataagctggtgatgcgtgccctgacgctcctgcaaaaacatcatgtcgactataacgtgctggtctgcgttaatcgcaccagcgcgcagcaaccgttgcaggtatatgattttttgtgcgatgcgggagtcgaattcatccagtttattccggtggtcgagcgcctggctgatgaaacaactgcccgcgatggacttaagttacatgcgcctggtgatattcagggtgagctaacggaatggagcgtgcgccccgaggagttcggtgagtttctggtggcgatattcgaccactggatcaaacgcgacgtcggcaagattttcgtgatgaatatcgaatgggcgtttgccaattttgtcggtgcgccgggtgcggtttgccatcatcagccaacctgtgggcgcagcgtgattgttgagcacaacggcgacgtttacgcctgtgatcactatgtttatccgcaatatcggctggggaatatgcaccagcaaacaattgcagaaatgatcgattccccgcaacagcaggcgtttggtgaagataaatttaagcagttaccggcgcagtgtcgcagttgtaacgtgttaaaagcgtgctggggaggctgcccgaaacaccgcttcatgctcgatgccagcggcaaaccgggactgaattatttgtgtgccgggtatcagcgttatttccgccatctaccgccatatcttaaagcaatggctgatttgctggcgcacggtcgcccggccagcgacattatgcatgcgcatttgctggtggtgagtaagtaaaaatcggcggccgcctgcggttgattgccggatgcggcgtaaacgccttatccggcctacatgatcgtgcaaattcaataaattgcagcgttctgtaggctggataagatgcgtcagcatcgcatccggcaaaggcagatctcagcgatagcgccggcttagtcagatttaatctgcgcgcgtggtggatattttttcaggatctccatatacgcgtgcatttcggtctgtagcggtacacccatcggaatatggcgcacgccgatggagtcgctttcctgcggatcggtgtagaggttaaacacgctgcttcccgccgtttgcattactgtgccggtgaatccaccctgatatccgctctgggtataagcgtaaggttgctgaatcaggacgtgatacttgaactcatccatacgcacagcagcgagtttaccgttgaggaagtagtgctcggccttacggttagactgaccatttgttcccaggaagaaggatgtctggtccacaccatcgataaaggtggttttcggcactaaattcgccactttcgctccaggatgccctgccagatccagcgcggtagggaagagatctgccagatcgacaataccgtcagatttacgcggttggatcatccctttccagtaaacgaaagtcggtacgcgaacgccgccttcccaggtgctacctttcgcaccacggaacggggtgcgtccgtgcggcggtacttcggcttccggtccgttatcggaggtaaagacgatcagcgtgttatcaagctgaccgtttttctccagtgttttatacagattagcgaacacatcgttcatctccaccatgcagtcgccatagctggtgcgtgccggagagctacccgcatatttcgcatttgggtagttatcgaagtggcagccacgagtgccgtagtagaggaagaatggtttatcgctcttcgccatcttgtcgaggaacttaacgccatagtccatccagcgttgatccagatcttccatatatttcggcgtaatgtcggcaatggcctgttgttcgccgccgcgcaccgcatgaacgtcatctttgctgaacggtaattgcttgatgtattcagaacggtccggactcagggccacttccggattgacgtgaacgtcgcgccattcggtgtacatatcagacacgctgttaaagccacggaaatcatcaaagccaacgttctgcggctggctctctttgttttcccccatatgccattttccgatggcctgagtgacgtagccctgatcgtgcagcaactgcggcagcgtggttaacccttgcagcccgcccggttgcccgtacattggcggcatcagaatgccgtggtggatggagtattgtccggtgagaatggtggcgcgggttggggaagagcttggttgagaatacgcgctagttaaaatcagcccctggctggcaacggcgtcgatatctggtgtagggttacccaccgccacgccgccaccgttaaaaccgacgtccatccagcccacatcgtccagcaagaaaacaaccacattcggtttcttaccggtttttttctcaagttctgccagcttctgctgggtttctttatcctgcgccggatgctgcattactggcatcatattgtcggcaatagtggtcgccggtttaaccagatactggtttgggtgatcgtatccggcaaagcctttgcgtgcggtggcagtactcggggtatctgctgcgctggccatgagaggaagagcggcggcgacagcaacaacaagacgtttgggactaaagctaaattccatgcaaaatgctccggtttcatgtcatcaaaatgatgacgtaattaagcattgataattgagatccctctccctgacaggatgattacataaataatagtgacaaaaataaattatttatttatccagaaaatgaattggaaaatcaggagagcgttttcaatcctacctctggcgcagttgatatgtaaggcaggtttattatatcgcgttgattattgatgctgtttttagttttaacggcaattaatatatgtgttattaattgaatgaattttatcattcataataagtatgtgtaggatcaagctcaggttaaatattcactcaggaagttattactcaggaagcaaagaggattacagaattatctcataacaagtgttaagggatgttatttcccgattctctgtggcataataaacgagtagatgctcattccatctcttatgttcgccttagtgcctcataaactccggaatgacgcagagccgtttacggtgcttatcgtccactgacagatgtcgcttatgcctcatcagacaccatggacacaacgttgagtgaagcacccacttgttgtcatacagacctgttttaacgcctgctccgtaataagagcaggcgtttttttatgtatcaggaaggccccggaggtgcttgcctccgggtgagaaggaattactgtggcgggttattctgcaacgttaacatcaaaccgtcgcgacgcatagctgcagcttcttccggcttgtgcagtctgtccagcgcgtcggcaagccatgcgtaatcgtaggcgtccggacgttgtttcagcgctgcgcggaaggcgaggcttgcttcctgccattctccgtgcttcatcagactctggcccagtgtgctccacaacagcgggcgatcgccgacgtttttgatttgctggcgcagcactttttccagctgttccggattgtttgttttcagtcgaggaatcggcagcagtaggcgatcgtcgtactggcgtttcaggccatcgatgataatttgctgggcagtatcatgatcgtcacattcaataagatgttccgccattgccacctgcaacgctacctgatgacgcgttttccggctttggtttttccaccagttacgcaaaccttcgctaccgttatcggcacgcgcctgatccatcaggccaatccatgcctgttgttccagcattgcacgatgttcttcatcaccaacatgggctttcgccatacttgggataatatccagcaggctactccatgcacctgtgcggatatacgcctgttccgccagacgtaatacttccggatggcgtggcgtaacttccagcagcttatccacgccgtggcgtgcagcatggttttcattacgggccagttgcagacgtacgcgggtgatttctaccggaatggtgtcgttgccggccagctccgctgcgcgttccagatgttggttggcgcgtgcttcatcaccacgttgttgcgcggcttcggcagccagtagatagttcaccaccggttgttccgcgtgatcggcatttttcgccatcagcttttcaacttgctgataatcgccttccgccagtttcagcagcgcctgttcggtctgcttacgtgcacggcgacgcttacgtccgacaaaccacccacgggtgtgcgcgccagtgcggaagatccgccgcagtagccactcaatggcaaacagcactaccatcgccagaatcaatatgatcgccaggcccgtgacgctggtttcgatattgtagttgtcggtctggatcagcacataaccctgatggccggcaatcatcgggccaaccacgatccccgcaatcagcaacacaaagagcaataacacttttagcatggttattctccttgcggcgcggctgccggagtatcagcttgcggtgcaggtgcaggtttagcttccgttgtccccgctgccggttgtgccagcaggttacgcacgcgagtctgcatcagtttttccagcatcgcctggctttgcagggtttccggaagatccatgctgatattttgctggcttaactggtccacctcgtcgaggaacgctttggtggtggcatcatcagtatcgtagtaagcacgtacccaggtggagacgttctccagcgcctggcgataagtctcttcctggtgacgcggtacagcttgtgctgcgaccagcaggcgagagcgaatattttcgcgcagatagatatcctgatttggcgctaacagcggtacggcggtgtcatcacgacggcgaatcgtaatgaagttgtccataaagttctgccagcttttttgcagattgatacgccattcgctgatggaactggaaagctcttcaccgtcactatccatcgggctaccatcgctgtcattatcggccagacgcaggttatctacctgattactaagctgattaagcttaaggatgatgccgtcataatccacctggcttactgcagaaaggctggcgatatcatcggtaattgcccgacgaacggtaatcagactcgggtcattcatatccgccaggctggcgtctgcacttttcagcaacgctgcagcggtcgtgacgtcctgatcgctccacagcttccgtccggcgagtttcaccagaaaatcggcctgagccagcagccaggttttagcatcgctgccggaaatggtggcgaccttttgttggacttcatccaactgttttgccagcgtttcttgctgacgattcgcctgcttaagttgtgcagcttgttgcttaataatgccttccagctcggctttttggctctcctgggctttttgcaatgccgtcagttggttagccagggcatcgctggtggcggtctgattgacggcctgttgtttaccccagccatacaaaccgatgcccgccgccagagcaatagcgatagccaccgcgctgagaatcaatgcggtattgttcttactctttttttctgttgcgacaggttgactcgtggtgtccacggcctccctggtctcttcaaccacggcggaggttttttcttgttccgtcattatggcttcctgttatgagagttattgtaatgcccgtaaaagcgcatcgttgtcagcgttatcggcgaccttaatgtcttgccagcccagttcccgggcgagtttcgccaaacgctcactgacgaccaatagtcgacagtgtagtaaccagtgctcacgataccattgtgggatcaggctccagagttgctgcaacatttcaccgctggtaacaacgaccatcgtcacctcgcgggcttgccagcgcatcgcttcttctgcaccatcgtaatggattgcgcatcgttgataacattcacaaaaagtgacctcagcaccgcgcgccgtcagggtatccccaattagctcacgaccaccattgccacgtaatatcagcgcacgtttgcccgcaatattttgtaattcaggtaattgtagcaagacttcgctgatttcccgatcctgcgggtagagaatcttctgtccacttacggtatgtagtgccagtgcggtggtgcgtccaatggcgaaataatcaggtagtcggggccatttacgatcttgctgatgcagctgactttgggcaaaagcaaccgcgtgttggctgagggcaaacaacagatcgctctcccccagcgctgccagttgatcagcaagttgcggtaattgttgacccggagaaaactcaatcagcggaaaatgccaggccacctgccccagtgtgcgcagacggctcactaactcttctccagcgggagacgggcgggtgacaaggatactcatgccggggcgtctccgttatagacttcagcgaggatctcgcgcgcgccgttattcagtagctcttctgccaggctaatccccatttgttcggcatcttgcggcgcaccgcggcgttcaccgcgaataatctggctaccgtccggcgcgccgaccagcgcacgcagccagatttcgccatcaataagctcggcgtagctaccaattggcacctgacatccgccttcgagacgggtattcatggcgcgttctgcggtaacgcgcagtgcagtttcgtggtgattcagcgcggcaagcagctcgcgagtgcgactatcatcaaggcggcattcaatacccaccgcaccttgtcctaccgccggaagagaaatctcgggtggcaacgcggcgcgaatacgactctccagacctaaacgttttagtccggctacggcaagaatgatggcatcgtattcgccgttatccagtttgctcaggcgagtgccgacgttgccgcgcagggagcggataatcagatccggacggcgttcagccagttggcactggcgacgtaaactggacgtcccgacgatactgcctgccggtaacgcatccagactgtcatagttattggacacaaaggcatcgcgaggatcttcacgctcacaaatagtgaccagtcccagaccttgcgggaattcaaccggcacatctttcatactgtgtacggcgatatcggcgcgattttcgaggagcgcgacttccagctcttttacaaataagccttttccgcctactttcgccagcggcgtatcaagaatcacatcgccgcgcgtcaccatcggtaccagttcaacgaccaggcccggatggctcgccatcaacttgtctttgacatagtgtgcctgccagagtgcaagtgggctttggcgtgtggcaattcttaaaacattgtctaacatgcttgttaccgtcattatcatccgtggtccatcctaacatccttgccagagtgatgtcagtgttgtggtgaaacgtagacgcctgcgcaaaccgtaaaatgaggtctggcagtggatcctgacaggcgtttcacgccgttgtaataaggaatttacagagaataaacggtgctacacttgtatgtagcgcatctttctttacggtcaatcagcaaggtgttaaattgatcacgttttagaccattttttcgtcgtgaaactaaaaaaaccaggcgcgaaaagtggtaacggttacctttgacatacgaaatatcccgaatgccgcgtgttaccgttgatgttggcggaatcacagtcatgacgggtagcaaatcaggcgatacgtcttgtacctctatattgagactctgaaacagagactggatgccataaatcaattgcgtgtggatcgcgcgcttgctgctatggggcctgcattccaacaggtctacagtctactgccgacattgttgcactatcaccatccgctaatgccgggttaccttgatggtaacgttcccaaaggcatttgcctttacacgcctgatgaaactcaacgccactacctgaacgagcttgaactgtatcgtggaatgagtgtacaggatccgccgaaaggtgagcttccaattactggtgtatacaccatgggcagcaccagctccgtagggcaaagttgttcctctgacctggatatctgggtctgtcatcaatcctggctcgatagcgaagagcgccaattgctacaacgtaaatgtagcctgctggaaaactgggccgccagcctgggtgtggaagtcagcttcttcctgattgatgaaaaccgcttccgtcataatgaaagcggcagcctggggggcgaagattgtggctccacccagcatatactgctgcttgacgaattttatcgtaccgccgtgcgtctcgccggtaagcgtattctgtggaatatggtgccgtgcgacgaagaagagcattacgacgactatgtgatgacgctttacgcgcagggcgtgctgacgccaaatgaatggctggatctcggtggcttaagcagcctttctgctgaagagtactttggtgccagcctttggcagctctacaagagtatcgattccccatacaaagcggtactgaaaacactgctgctggaagcctattcctgggaatacccgaacccacgtctgctggcgaaagatatcaaacagcgtttgcacgacggcgagattgtaagctttggtctcgatccatactgcatgatgctggagcgtgttactgaatacctgacggcgattgaagattttacccgtctggatttagtacgtcgctgcttctatttaaaagtgtgcgaaaagctcagccgtgaacgcgcctgcgtaggctggcgtcgcgcagtgttgagccagttagtgagcgagtggggttgggacgaagctcgtctggcaatgctcgataaccgcgctaactggaagattgatcaggtgcgtgaggcgcacaacgagttgctcgacgcgatgatgcagagctaccgtaatctgatccgctttgcgcgtcgcaataaccttagcgtctccgccagtccgcaggatatcggcgtgctgacgcgtaagctgtatgccgcgtttgaagcattaccaggtaaagtgacgctggtaaacccgcagattagtcccgatctcagcgaaccgaatctgacctttatttatgtgccgccgggccgggctaaccgtagtggttggtatctgtataaccgcgcgccaaatattgagagcatcatcagccatcagccgctggaatataaccgttacctgaataaactggtggcgtgggcatggtttaacggcctgctgaccagccgcacccgtttgtatattaaaggtaacggcattgtcgatttgcctaagttgcaggagatggtcgccgacgtgagccaccatttcccgctgcgcttacctgcaccgacaccgaaggcgctctacagcccgtgtgagatccgccatctggcgattatcgttaacctggaatatgacccgacagcggcgttccgcaatcaggtggtgcatttcgatttccgtaagctggatgtcttcagctttggcgagaatcaaaattgcctggtaggtagcgttgacctgctgtaccgcaacagctggaacgaagtgcgtacgctgcacttcaacggcgagcaaagcatgatcgaagccctgaaaactattctcggcaaaatgcatcaggacgccgcaccgccagatagcgtggaagtcttctgttatagccagcatctgcgcggcttaattcgtactcgcgtgcagcaactggtttctgagtgtattgaattgcgtctttccagcacccgccaggaaaccgggcgtttcaaggcgctgcgcgtttctggtcaaacctgggggttgttcttcgaacgcctgaatgtaagcgtacagaaactggaaaacgccatcgagttttatggcgcgattagccataacaaactgcacggcctgagtgtgcaggttgaaaccaatcacgtcaaattaccggcggtggtggacggctttgccagcgaagggatcatccagttctttttcgaagaaacgcaagacgagaatggctttaatatctacattctcgacgaaagcaaccgggttgaggtatatcaccactgcgaaggcagcaaagaggagctggtacgtgacgtcagtcgcttctacagcagtagccatgaccgttttacctacggcagtagcttcatcaacttcaacctgccgcagttctatcagattgtgaaggttgatggtcgtgaacaggtgattccgttccgcacaaaatctatcggtaacatgccgcctgccaatcaggatcacgatacgccgctattacagcaatattttagctgatgaacgtgccggaaagcgaggcttatccggcatgcaatcttagcggaaactgactgtttcacccgcctgctgcgtcgccgcctgttccagcaaatcccagaaggtttcgccgctgcgatcacaaatccactcatcgcctttcaggtcaaaatggtagccgccctgtttggttgccagccatacctggtgcagcggctcctggcggttgataatgattttgctgccattctcaaaggtaatggtcagtacgccgccgttgatttcgcagtcgatatcgctgtcgccatcccagtcgtccaggcgttcttcaatggtcagccagagttgatcagccaggcgatgaaattcactgtcgttcattgttgtatcctgtttttaagtgatggcggcagtatagcggcatggggtcagggcttcaaagtttgcacctctgcggctgcgttccggcacgatagttccgtcaccggaataatgatgtctctgtgtagcgaaagatttgtctctagtttagggcgcagttacaccacgtctttccctgtttctggtaaacattatgatcaggtttaccgagcgagcatcctcacgctgacggaactaaaaaagacaacaaacaaaccacattgcgatagtgcataaagccatcctggcgcgaggtgccgatcacgaaactaccagcaaaacataaatccccacgagtaagcgttatactcgcagcatttcctcacttttcagacttcataaagagtcgctaaacgcttgcttttacgtcttctcctgcgatgatagaaagcagaaagcgatgaactttacaggcaatccataatgaaaaacgtgtttaaggcactcactgtattacttactctcttcagcctgacgggctgcggtctgaaaggtccgctctatttcccgcctgcagataaaaacgcaccgccgccgaccaaaccggtagagacgcaaacgcaatccacggtgccggataaaaacgatcgcgccactggcgatggtccatcccaggtgaattactaaaagtcagtttctgtacccgcgtgattggagtaaatgatgcagttcagcaaaatgcatggccttggcaacgattttatggtcgtcgacgcggtaacgcagaatgtcttttttagtccggagctgattcgtcgcctggctgatcggcacctgggggtagggtttgaccaactgctggtggttgagccgccgtatgatcctgaactggattttcactatcgcattttcaatgctgatggcagtgaagtggcgcagtgcggcaacggtgcgcgctgctttgcccgttttgtgcgtctgaaaggactgaccaataagcgtgatatccgcgtcagcaccgccaacgggcggatggttctgaccgtcaccgatgatgatctggtccgcgtaaatatgggcgaacccaacttcgaaccttccgccgtgccgtttcgcgctaacaaagcggaaaagacctatattatgcgcgccgccgagcagacaatcttatgcggcgtggtgagcatgggaaatccgcattgcgtgattcaggtcgatgatgtcgataccgcggcggtagaaacgcttggtcctgttctggaaagccacgagcgttttccggagcgcgccaatatcggttttatgcaagtggttaagcgcgagcatattcgtttacgcgtttatgagcgtggggcaggagaaacccaggcctgcggcagcggcgcgtgtgcggcggttgcagtagggattcagcaaggtttgctggccgaagaagtacgcgtggaactccccggcggtcgtcttgatatcgcctggaaaggtccgggtcacccgttatatatgactggcccggcggtacatgtctacgacggatttattcatctatgaagcaaccaggggaagaactgcaggaaacactcacggagcttgatgaccgggcggttgtcgattatctgattaaaaatcctgagttttttatccgtaatgcgcgcgcagtagaagcgatacgtgtgccgcatccggtacgcggcaccgttagcttggtcgagtggcacatggcccgcgcacgtaatcatattcatgttctggaagagaacatggcgctgttgatggaacaggctatcgccaacgaaggcctgttttatcgcctactctacctgcagcgcagtctcaccgccgccagcagtctcgacgatatgctgatgcgctttcaccgctgggcgcgcgatctcggcctggcaggtgcgagtctgcgcctgtttccggatcgctggcgcttaggtgcgccgagcaaccacactcatctggcattaagccgtcagtctttcgaaccgctgcgtattcagcgtttggggcaggaacagcactatcttgggccgcttaacggaccagagctgctggtggtgctaccggaagcgaaagcggtgggaagcgtggcgatgagcatgctgggaagcgatgctgatttgggtgtcgtgctgtttaccagtcgcgatgccagtcactatcaacaagggcaaggaacgcagttacttcatgaaattgcgctgatgttgccggagcttctggagcgttggattgaacgcgtatgaccgatttacacaccgatgtagaacgctacctacgttatctgagcgtggagcgccagcttagcccgataaccctgcttaactaccagcgtcagcttgaggcgatcatcaattttgccagcgaaaacggcctgcaaagctggcagcaatgtgatgtgacgatggtgcgcaattttgctgtacgcagtcgccgtaaagggctgggagcagcaagtctggcgttacggctttctgcgctacgtagcttttttgactggctggtcagccagaacgaactcaaagctaacccggcgaaaggtgttagcgcaccgaaagcgccgcgtcatctgccgaaaaacatcgacgtcgacgatatgaatcggctgctggatattgatatcaatgatcccctcgctgtacgcgaccgtgcaatgctggaagtgatgtacggcgcgggtctgcgtctttctgagctggtggggctggatattaaacacctcgacctggagtctggtgaagtgtgggttatggggaaaggcagcaaagagcgccgcctgccgattggtcgcaacgctgtggcgtggattgagcactggcttgatttgcgcgacctgtttggtagcgaagacgacgcgctttttctgagcaaactgggcaagcgtatctccgcgcgtaatgtgcagaaacgctttgccgaatggggcataaaacaagggctgaataatcacgttcatccgcataaattacgtcacagcttcgccacgcatatgctggagagcagcggcgatcttcgtggtgtgcaggagctgctgggtcatgccaacctctccaccacgcaaatctatactcatcttgattttcaacaccttgccagcgtgtacgatgcggcgcatccacgcgccaaacgggggaaataatgcgtttttaccggcctttggggcgcatcagcgcgctcacctttgacctggatgataccctttacgataaccgtccggtgattttgcgcaccgagcgagaggcgcttacctttgtgcaaaattatcatccggcgctgcgcagcttccagaatgaagatctgcaacgcctgcgccaggcggtacgggaagcggaacccgagatttatcacgacgtgacgcgctggcgttttcgtagcattgaacaagcgatgctcgacgccgggctgagtgccgaagaagccagtgcaggcgcacacgcagcaatgatcaactttgccaaatggcgcagccgaatcgacgtcccgcagcaaactcacgacaccttaaaacagctggcgaagaaatggccgctggtggcgatcaccaacggtaacgcccagccggagctgtttggtttgggggattattttgagtttgtgctgcgcgctggcccgcacgggcgcagtaaaccgttcagcgatatgtactttttggctgcggaaaaactcaacgtgccgatcggcgagatcttacatgttggggacgatctcaccactgacgtgggtggggcaattcgcagcggaatgcaggcttgttggatcagaccggaaaatggcgatctgatgcaaacctgggacagccgtttactgccgcatctggaaatttcccggttggcatctctgaccagcctgatataatcagcaaatctgtatatatacccagctttttggcggagggcgttgcgcttctccgcccaacctatttttacgcggcggtgccaatggacgtttcttacctgctcgacagccttaatgacaaacagcgcgaagcggtggccgcgccacgcagcaaccttctggtgctggcgggcgcgggcagtggtaagacgcgcgtactggtgcatcgtatcgcctggttgatgagcgtggaaaactgcagcccatacagcattatggcggtgacgtttaccaacaaagcggcggcggagatgcgtcatcgtatcgggcaactgatgggcacgagccagggcggtatgtgggtcggcaccttccacgggctggcgcaccgtttgctgcgtgcgcaccatatggacgccaatctgccgcaggatttccagatcctcgacagtgaagaccagctacgcctgcttaagcgtctgatcaaagccatgaacctcgacgagaagcagtggccgccgcggcaggcaatgtggtacatcaacagccagaaagatgaaggcctgcgtccgcatcatattcaaagctacggtaatccggtggagcagacctggcagaaggtgtatcaggcgtatcaggaagcgtgtgaccgcgcgggcctggtggacttcgccgagctgctgctgcgcgctcacgagttgtggcttaacaagccgcatatcctgcaacactaccgcgaacgttttaccaatatcctggtggacgaattccaggataccaacaacattcagtacgcgtggatccgcctgctggcgggcgacaccggcaaagtgatgatcgtcggtgatgacgaccagagtatctacggctggcgcggggcgcaggtggagaatattcagcgtttccttaatgatttccccggtgccgaaactattcgtctggagcaaaactaccgctctaccagcaatattctgagcgccgctaacgccctgattgaaaacaataacgggcgtctgggtaaaaaactgtggaccgatggcgcggacggtgagcctatttccctctattgcgcttttaacgaactcgatgaagcgcgttttgtggttaaccgcatcaaaacctggcaggacaacggcggagcgcttgccgagtgcgccattctctaccgcagcaacgcccagagccgggtgctcgaagaggcgttattgcaggccagtatgccgtaccgtatttacggcgggatgcgcttcttcgaacgccaggaaatcaaagatgcgctcagctatctgcgcctgattgccaaccgcaacgacgacgcggcctttgagcgtgtggtgaatacgccaacgcggggtattggtgaccggacgctggacgtggtacgtcagacaagccgcgatcgccagttaacactctggcaggcatgtcgtgagctgttgcaggaaaaagccctcgccgggcgagctgccagcgccttgcagcgatttatggaattaatcgacgccttagcgcaggaaactgccgatatgccgctgcatgtacagactgaccgggtaattaaagactccggcctgcgtaccatgtatgagcaggagaagggcgaaaaaggtcagacgcgtatcgaaaacttagaggaactggtgacggcaacgcgccagttcagctacaacgaagaagacgaagatttaatgccgctgcaggcgttcctctcccatgcggcactggaagcaggtgaagggcaggcggatacctggcaggatgcggtgcagttgatgacgctacacagcgcgaaaggcctggagttcccgcaggtgtttatcgttggtatggaagagggcatgttcccaagccagatgagcctggatgaaggcgggcgtctggaagaagaacgccgtctggcctacgttggcgtaacccgcgcgatgcagaaactgacgctgacctacgcggaaacccgccgtctgtatggtaaagaggtttaccatcgcccgagccgctttatcggcgagctgccggaagagtgtgtggaagaggtgcgcctgcgcgccacggtaagccgcccggtcagccatcagcggatgggtacgccgatggtcgagaacgacagcggctacaagctcggccagcgcgtacgccacgctaagtttggtgaaggcaccattgtcaatatggaaggcagcggtgagcatagccgtttgcaggtggcatttcagggccagggtattaaatggctggtggcggcatacgcccggctggagagcgtgtaacgttgccggatgcggtgctgcgcaccttatttggcctaaaaaatcattcagattcaataaattgcaacgtcatgtaggccggatagggcgtttacgccgcatccggcatctgcgccatcttcagtatctgacacaaaactatcgttttaacctttccgctcgacggaaatcatggtgacaaaaggatagcgttgccacgggattgccccgcctttcatatacatatgactaatcgtgccatcaagataaagcagctgctcaacgttcagtttcgctttggcataacaggcaaaatcataaaaatttgttgcctgctggctcaacaaaaacacggcgttcccatgtttattaatcccaacaccgttacgaattttgctactggcgacgttgggatgaatacgcggattaattacaccgttttccatcaacattggcccactctgcaccgcaaactgaatctctttactggttttgaaggcatccagacgaacgatgccgactttatctcccgcgacataaaacacgccgccaggacggataaagaaattcccttcaccactagcgagatttaacgccaccttctgctgaccgttttcgatgtacaaaccgagcggcgcatagctttcatcatagatgccgccgttcatcgccatctgcacctgaccctgactattaatatccgccagcagagcatgtaacgttccccacgcttcgccattggctttttgccagtacattttcacccgctctgtttgaggattaacggtatacgcctgtacggtcagcgtcggatcactgagtgcgcaatcatcagcggcaacagcaaacaagggaagtaaggtgagggcgagaaaaatccgtttgagattcaaggtgatcattcctttaccaatgagtagctgatgcgccattataggtcctggatgtgggatttttttatcctgttagcgaccttgacgagtaccaaaaagcgcgaagttcaactattgttctgtggtgttctgttgcgtgttgacggcaaaattttgctggcgtaacatgcgcgcacgatcactctaagaggacattcgccttggacacacccagtagatactggctcactatcctgtcatccaggatcaactcctaaggctatccctttttgctgatagccttagcggttgtcagcgacctcaatttttcccgtcgcgctgagtcaggctgtttaatggtctgaaacccaatttgtttctgtgtgcccaccgaactgtccgatattttaagcattgggagtcccggtcatgctgagcgcatttcaactggaaaataaccgactgacccggctggaagtcgaagagagtcaaccccttgtaaatgcagtatggattgatcttgtcgaaccggacgacgacgagcgactgcgcgtacaatctgaacttggccagagcctggcaacccgcccggaactggaagacatcgaagcaagcgcacgtttctttgaagacgacgacggcctgcatattcactccttcttcttctttgaagatgcggaagatcacgccggtaactccactgtggcatttaccatccgtgatggtcgtctgtttactctgcgtgagcgtgaactgcccgcttttcgtctgtatcgtatgcgtgcccgtagccagagcatggtagacggtaacgcctacgagttgctgctggatctgttcgaaaccaaaatcgaacagttggcagatgaaattgaaaatatctatagcgacctggagcagttgagccgggtgattatggaagggcatcagggcgatgagtacgacgaggcgctctccactctggcggaactggaagatatcggctggaaagttcgcctgtgtctgatggatacccagcgcgcgctcaacttcctggtgcgtaaagcgcgtttaccgggtgggcaactggagcaggcgcgtgaaatcctgcgagatatcgaatccctgctgccgcataacgaatccctgttccagaaggtgaacttcctgatgcaggcggcaatgggttttatcaacatcgagcagaaccgcatcatcaaaatcttcagcgtggtatccgtggtattcctgccgccgacgctcgttgcttccagctatggcatgaactttgagtttatgccagaactgaagtggagcttcggctaccctggcgcgattatctttatgatcctcgcgggcctggcaccgtatctgtactttaagcggaagaactggttgtaaaaaacgagagcggtggcttagtctggctaagccacctgttattcaaaggctccaggtatttaacccttttacctctttctcatagaaccatttgttcgtgttaacagcaacataggctgctacggcaattcccagaatgttaacgccaattagtgcaccaacaaatagagatagaataccaagtaatagaactataattgcttttttccataaccccaggacaaataaatatatccaggaacagaagaaagcaatgaaattcatttgaatagttaagcgttgtcttacttttaatgctttaaatgctgctttatattctggtgttgccccccagaatccaggaaaaccatgttgatcataaaaattaaatcggtatttccatttttcacttaaactaccatcgttcatatattccttactcataaatactccataattattgtttactactatcagtaggtgcaagcattagcatactgaaagtggaaaaataacaaatcaaaaaaatcatgctaccattgccactacaggcaaaatcttcggctatcattgtgatgatagagatgatatatactgctaatgtaccaaaaacataagtttttatatagatgaaaccactatcacggagtcgctggcaattcatgttgatgacgagataatggagtacgatggtagagactataacaagaaagcctgcttctccatcgttaaaaaagataataagaaaggcaaaaatgaaatttattaaaataaaactaaatatataacgacgtctggaaatcttaccgttagatgttgggataaatatacgtaacataaattttacatccttgtatgagtctccggtcagcatggcaatatgcccactctcatgcaagagtcggcatattttttcagaatatatttattttttatttggacgttctacgctgcgtataaatcgcatccatcacaaaaattgccagcgccacccaaataaaggcgaaagtcaccatcttatcggcacccggtttttcaccataaaacgtcacagccagcaggaacatcagcgtcgggccaatgtactggaaaaagcctaacgtactgagacgcaagcgcgtggcagcggcggtaaaacacaacagcggtacggtagtgacaataccggcggcgatcagcagtaaattcaggctcatcgggttttgccccatatggctggtactgctgtcggcaatagcaaacaggtaaattgccgccacgggcagcagccacatggtttcgattaacatgccggtttgcgcttcaacggcaatcttcttgcgtaccagaccgtagaaggcaaaactaaatgccagtcccagcgcgataataggtaggctaccaaaagtccacagctggactaacacgccacatatcgccagaatcaccgccagccattgcatccggcggaatcgctcgccgaggaaaatcatccccagcacaatgttcaccagcgggttaataaagtaaccaaggctcgcttccagcatatggtgattgttcaccgcccagataaacagtagccagttgccaccaatcagcacggcagagactgccagcataaaaattttctgtggcgtctgaatcagcgtttttaaataggaccactggcggcaaatgctcatcagcaccaccataaagaaaaagctccagatcacgcgatgcgtcaggatttcatcggcgggcacgtagtaaatcaacttgaagtacgctggcgctataccccaaataaaataagcggcaagagcgagtaatacgccctgccgcgtttgttttgcatccatcgggaatactcatttttaattggtaacagcagtttacctgcttttatgtcttcaacctaccatataggtggcggtggcactggcaatataaagctgttcttcattgtgtaattcaacgcgggcgacggcgactttattgcctgcacgcaacaggctactagtagcagtaaaacgctcgcccctgcctgggcgcagataatcaacgcgaagatcaatggtccccatccggcttagccgctggcgtagttcatcttcactgatggtttcgtggcgggttaaggtacttcccacgcacaccagaccggcggcgacatccagcgcgctcgcaatgaccccgccgtgcaaaatgctttgcgcccagttgcccaccatcattggctgatttttaaaggccagctgtgcgaactctttttcgtaacgctccagttccatccccaatgcgcggttaaatggcatgtgataaacaaacatctcacccactaatttcagggcttgttcagcggtcagtacggcagacatatcatccttacacttcattggttaatgaaatgttgattttatgcttctttgttgttggtttctactttaggaagggataactaacggctatggagttaagtatgtaaaatagcccgcagaaaaatattcaccttatcaataattcgttacggagaacacgaccgatgcggactctgcagggctggttgttgccggtgtttatgttgcctatggcagtatatgcacaagaggcaacggtgaaagaggtgcatgacgcgccagcggtgcgtggcagtattatcgccaatatgctgcaggagcatgacaatccgttcacgctctatccttatgacaccaactacctcatttacacccaaaccagcgatctgaataaagaagcgattgccagttacgactgggcggaaaatgcgcgtaaggatgaagtaaagtttcagttgagcctggcatttccgctgtggcgtgggattttaggcccgaacagcgtgttgggtgcgtcttatacgcaaaaatcctggtggcaactgtccaatagcgaagagtctagtccgtttcgtgaaaccaactacgaaccgcaattgttcctcggttttgccaccgattaccgttttgcaggttggacgctgcgcgatgtggagatggggtataaccacgactctaacgggcgttccgacccgacctcccgcagctggaaccgcctttatactcgcctgatggcagaaaacggtaactggctggtagaagtgaagccgtggtatgtggtgggtaatactgacgataacccggatatcaccaaatatatgggttactaccagcttaaaatcggctatcacctcggtgatgcggtgctcagtgcgaaaggacagtacaactggaacaccggctacggcggcgcggagttaggcttaagttacccgatcaccaaacatgtgcgcctttatactcaggtttacagcggctatggcgaaagcctcatcgactataacttcaaccagacccgtgtcggtgtgggggttatgctaaacgatttgttttgatgaacggttgagtggttggcaaatctggaatccagcatccaggattaccctctcagagactaaaagcattgcagtttctcgcgcaggcgctgaaaatagcgcctgtttttatttcaggcaatcggggtgaatgtggcgcaggcggaagtgttgaatctggagtccggagctaaacaggttttacaagaaacctttggctaccaacagtttcgccccggccaggaagaaattatcgacactgtgctttccggccgcgattgcctcgtcgtcatgcccactggtggcggaaaatccctttgctatcaaatccctgccttattgctaaacggccttaccgtggttgttagtccgctgattagcttgatgaaagatcaggtggatcaactgcaagccaacggcgtggcggcggcgtgccttaacagcacgcaaacccgcgaacagcaacttgaagtgatgacaggctgccgcaccgggcaaattcgtctgctttatatcgccccggaacgcctgatgctggataactttcttgagcatctggcgcactggaatccggtgttattagccgttgatgaagcgcactgtatctcccaatggggccacgatttccgcccggaatatgccgcgctcggtcagttgcgccagcggttcccgacgctgccgtttatggcgctgaccgccacagccgacgacaccacgcgccaggatatcgtgcgcctgctggggctgaacgatccgctgattcaaatcagcagttttgaccgtccgaatattcgctacatgctgatggagaagttcaaaccgctcgatcagttgatgcgctacgtgcaggaacagcgcggtaagagtggcattatctactgcaacagccgcgcgaaagtagaagacaccgctgcgcgcctgcaaagcaagggaattagcgcggcggcctatcatgccgggctggaaaataatgttcgcgccgatgtgcaggaaaaattccagcgcgatgacctgcaaattgtggtggcgacggtggcgttcggcatgggcatcaataaaccaaacgttcgcttcgtggtccactttgatattccgcgcaatatcgaatcctattatcaggaaaccggacgcgccgggcgtgatggcctgcccgcggaagcgatgctgttttacgatccggctgatatggcgtggctgcgccgttgtctggaagagaagccgcaggggcagttgcaggatatcgagcgccacaaactcaatgcgatgggcgcgtttgccgaagcgcaaacttgccgtcgtctggtattgctgaactattttggcgaagggcgtcaggagccgtgcgggaactgcgatatctgcctcgatccgccgaaacagtacgacggtagtaccgatgctcagattgccctttccaccattggtcgtgtgaatcagcggtttgggatgggttatgtggtggaagtgattcgtggtgctaataaccagcgtatccgcgactatggtcatgacaaactgaaagtctatggcatgggccgtgataaaagccatgaacattgggtgagcgtgatccgccagctgattcacctcggcctggtgacgcaaaatattgcccagcattctgccctacaactgacagaggccgcgcgcccggtgctgcgcggcgaatcctctttgcaacttgccgtgccgcgtatcgtggcgctcaaaccgaaagcgatgcagaaaagcttcggcggcaactatgatcgcaaactgttcgccaaattacgcaaactgcgtaaaagcatagccgatgaaagtaatgtcccgccgtacgtggtgtttaacgacgcaaccttgattgagatggctgaacagatgccgatcaccgccagcgaaatgctcagcgttaacggcgttgggatgcgcaagctggaacgctttggcaaaccgtttatggcgctgattcgtgcgcatgttgatggcgatgacgaagagtaatcagcagcataaaaaagtgccagtatgaagactccgtaaacgtttcccccgcgagtcaaatgtatgttgatgttatttctcaccgtcgccatggtgcacattgtggcgcttatgagccccggtcccgatttcttttttgtctctcagaccgctgtcagtcgttcccgtaaagaagcgatgatgggcgtgctgggcattacctgcggcgtaatggtttgggctgggattgcgctgcttggcctgcatttgattatcgaaaaaatggcctggctgcatacgctgattatggtgggcggtggcctgtatctctgctggatgggttaccagatgctacgtggtgcactgaaaaaagaggcggtttctgcacctgcgccacaggtcgagctggcgaaaagtgggcgcagtttcctgaaaggtttactgaccaatctcgctaatccgaaagcgattatctactttggcagcgtgttcagtttgtttgtcggtgataacgttggcactaccgcgcgctggggcatttttgcgctgatcattgtcgaaacgctggcgtggtttaccgtcgttgccagcctgtttgccctgccgcaaatgcgccgtggttatcaacgtctggcgaagtggattgatggttttgccggggcgttatttgccggatttggcattcatttgattattagccggtgatgccagacgcgtcttcagagtaagtcggataaggcgtttacgccgcatccgacattatttttcacgcatgcctcgcgcttgctaacagcgctcccaccagcataaacaagctgccgaaaatcttattcagcgccttcatctgctttggtcctttaatccatagagcaatccgttgagcaagggtggcgtaaccgatcatcacaataatatcgaccacaatagtggtgacgccgagcacgatatactgcatcagttgcggctgttgcggcatgatgaattgcggaaatagcgccgccagaaacacaatacttttgggattggtgagattcacaaaaactgcgcgctggaacaaatgtcgacggctttgagtagaggccaggcttttaaggtcaattgcaccagcggcgcgccactgctggattcccagccaaatcaagtaagccgcgcctgcccacttcaacacttcaaacgcaatcacactgcgggaaaatagcgtccccaaccccacgccaaccagcacaatatgaatcgccagtccggtctgaagcccagcaatagacgccaccgcgccgcgataaccgtggttgaggctggtggtcatagtgttgattgcaccagagcctgggctcaggcttaaaatgatgcttgtcagcaggtaggcaaaccaccattctaaggtcatgatgaactcccggtgtgtctatttttgtgccacaatacgctactgtcgcagcgttgtgtcaggcacgctaaaaaaaacgattttacgtggtttaagaggcagattacccgatgtttcagcagcaaaaagactgggaaacaagagaaaacgcgtttgctgcttttaccatgggaccgctgactgatttctggcgtcagcgtgatgaagcagagtttactggtgtggatgacattccggtgcgctttgtccgttttcgcgcacagcaccatgaccgggtggtagtcatctgcccggggcgtattgagagctacgtaaaatatgcggaactggcctatgacctgttccatttggggtttgatgtcttaatcatcgaccatcgcgggcagggacgttccggtcgcctgttagccgatccgcatctcgggcatgttaatcgctttaatgattatgttgatgatctggcggcattctggcagcaggaggttcagcccggtccgtggcgtaaacgctatatactggcacatagcatgggcggtgcgatctccacattatttctgcaacgccatccaggtgtatgtgacgccattgcgctaactgcgccaatgtttgggatcgtgattcgtatgccgagttttatggcacggcagatcctcaactgggccgaagcgcatccacgtttccgtgatggctatgcaataggcaccgggcgctggcgcgcgttgccgtttgctatcaacgtactgacccacagcagacagcgatatcgacgtaacttacgcttctatgctgatgacccaacgattcgcgtcggtgggccgacctaccattgggtacgcgaaagtattctggctggcgaacaggtgttagccggtgcgggtgatgacgccacgccaacgcttctcttgcaggctgaagaggaacgcgtggtggataaccgcatgcatgaccgtttttgtgaactccgcaccgccgcgggccatcctgtcgaaggaggacggccgttggtaattaaaggtgcttaccatgagatcctttttgaaaaggacgcaatgcgcagtgtcgcgctccacgccatcgttgattttttcaacaggcataacagtcccagcggaaaccgctctacagaggtttaaatttcttatgtaccaggttgttgcgtctgatttagatggcacgttactttctcccgaccatacgttatccccttacgccaaagaaactctgaagctgctcaccgcgcgcggcatcaactttgtgtttgcgaccggtcgtcaccacgttgatgtggggcaaattcgcgataatctggagattaagtcttacatgattacctccaatggtgcgcgcgttcacgatctggatggtaatctgatttttgctcataacctggatcgcgacattgccagcgatctgtttggcgtagtcaacgacaatccggacatcattactaacgtttatcgcgacgacgaatggtttatgaatcgccatcgcccggaagagatgcgcttttttaaagaagcggtgttccaatatgcgctgtatgagcctggattactggagccggaaggcgtcagcaaagtgttcttcacctgcgattcccatgaacaactgctgccgctggagcaggcgattaacgctcgttggggcgatcgcgtcaacgtcagtttctctaccttaacctgtctggaagtgatggcgggcggcgttagtaaaggccatgcgctggaagcggtggcgaagaaactgggctacagcctgaaggattgtattgcgtttggtgacgggatgaacgacgccgaaatgctgagcatggcggggaaaggctgcattatgggcagtgcgcaccagcgtctgaaagaccttcatcccgagctggaagtgattggtactaatgccgacgacgcggtgccgcattatctgcgtaaactctatttaagctaatcgttctttatttggtcagttgtcaacctgatacttcgctacaatggatacccgttaatcaaagagttttccattgtggcgctacttatcatcaccacgattctgtgggccttctcctttagcttttatggcgagtaccttgcggggcacgtcgatagctattttgcggtgctggtgcgcgttggcctggcggcactcgtttttctgccgtttctgcgtacccgtggcaatagcctgaaaacggtcggcctgtatatgctggtgggcgcgatgcagcttggcgtgatgtatatgctgagtttccgcgcttatctctacctgacggtttccgagctgctgctgttcaccgtgctgacgccgctctacatcacgctgatttatgacatcatgagtaagcgccgtctgcgctggggctatgcctttagcgccttgctggcggtgattggtgccgggattattcgctatgatcaggtcaccgaccatttctggactggcttgctgctggtgcaactctccaatatcacttttgccattggcatggtgggttacaaacgcctgatggaaactcgcccgatgccacagcataacgcctttgcgtggttctatcttggcgcgtttctggtggcagtgattgcatggttcttgctgggaaatgcgcagaaaatgccgcaaaccacgctgcaatggggcattctggtgtttcttggcgtggtggcttccgggattggctactttatgtggaactacggcgcgacgcaggtggacgccggaacgctgggcattatgaataatatgcacgttccggcagggctgctggtaaacctggctatctggcaccaacagccgcactggccaacgtttattacaggcgcgctggtgatcctggccagtctgtgggtgcatcgtaagtgggtcgctccgcgctctagtcaaacggcagatgatcgcaggcgtgattgcgcgctgagcgaataattacaggcgcgctggacttcctggcctcactgtgggtgcatcgtaagtgggtcgctccgcgctcttcacaaacggcagatgatcgcaggcgtgattgcgcgcactgcgaataaacgcttccgtaactggctgacgctgctcgccatcgcgcacggcggcgtacagtcggctccacaagccttcgcccagggttttggtcaccaccagaccctggcgctcaaaactctctactacccaatgcggtagcgcggcaatacccatccgcgcggcaaccatctgaatcaacaataaggtgttatcgacgcttttcagactcgggctgacgcctgccggctgaagaaaatgccgccagacatccagtcgactacgctgcaccggataaattaatagcgtctcgctggcgagatcttccggtgtaattcgcgttttcgccgccagtggatggtcaggtgctaacaccagacgcacttcatagtcgaacatcgggctataatgcaggccactgcgcggcagaatatcggacgtcattaccagatccagctctccctgttgcaaggcgggctgcgggtcaaatgtcacgccgcttttaaaatccatctctacctgcggccagttcttatggaaattttctaacgcgggtgtcagccactgaatacagctatggcactcaatggcaatgcgcagacgcgtctgctgcggttcattgcaggcttgcagggcctggctaatttgcggcagtacctggtttgccagttgcaacaggatttctccctgcggtgtaaagcgtagcggctggctcttacgcacaaatagccggaagccaaggcgttgttccagatcgctaaactggtgagacagggcggattgcgtctgatgcaacgtcgccgcagcggctgcgaggctgccgcagttccgcaacgcttgtagcgttttcaggtgttttacttcgatcatgaaagtccttcacttcggcatgaataatttgcgcttgaggaatatacagtaaccgccaattatggatgtgtaaacatctggacggctaaaatccttcgtcttttaaatttatggtgcgttggctgcgtttctccaccccggtcacttacttcagtaagctcccggggatgaataaacttgccgccttccctaaattcaaaatccataggatttacatataattagaggaagaaaaaatgacaatattgaatcacaccctcggtttccctcgcgttggcctgcgtcgcgagctgaaaaaagcgcaagaaagttattgggcggggaactccacgcgtgaagaactgctggcggtagggcgtgaattgcgtgctcgtcactgggatcaacaaaagcaagcgggtatcgacctgctgccggtgggcgattttgcctggtacgatcatgtactgaccaccagtctgctgctgggtaacgttccggcgcgtcatcagaacaaagatggtagcgtagatatcgacaccctgttccgtattggtcgtggacgtgcgccgactggcgaacctgcggcggcagcggaaatgaccaaatggtttaacaccaactatcactacatggtgccggagttcgttaaaggccaacagttcaaactgacctggacgcagctgctggacgaagtggacgaggcgctggcgctgggccacaaggtgaaacctgtgctgctggggccggttacctggctgtggctggggaaagtgaaaggtgaacaatttgaccgcctgagcctgctgaacgacattctgccggtttatcagcaagtgctggcagaactggcgaaacgcggcatcgagtgggtacagattgatgaacccgcgctggtactggaactaccacaggcgtggctggacgcatacaaacccgcttacgacgcgctccagggacaggtgaaactgctgctgaccacctattttgaaggcgtaacgccaaatctcgacacgattactgcgctgcctgttcagggtctgcatgttgacctcgtacatggtaaagatgacgttgctgaactgcacaagcgcctgccttctgactggttgctgtctgcgggtctgatcaatggtcgtaacgtctggcgcgccgatcttaccgagaaatatgcgcaaattaaggacattgtcggcaaacgtgatttgtgggtggcatcttcctgcagcttgctgcacagccccatcgacctgagcgtggaaacgcgtcttgatgcagaagtgaaaagctggtttgccttcgccctacaaaaatgccatgaactggcactgctgcgcgatgcgctgaacagtggtgacacggcagctctggcagagtggagcgccccgattcaggcacgtcgtcactctacccgcgtacataatccggcggtagaaaagcgtctggcggcgatcaccgcccaggacagccagcgtgcgaatgtctatgaagtgcgtgctgaagcccagcgtgcgcgttttaaactgccagcgtggccgaccaccacgattggttccttcccgcaaaccacggaaattcgtaccctgcgtctggatttcaaaaagggcaatctcgacgccaacaactaccgcacgggcattgcggaacatatcaagcaggccattgttgagcaggaacgtttgggactggatgtgctggtacatggcgaggccgagcgtaatgacatggtggaatactttggcgagcacctcgacggatttgtctttacgcaaaacggttgggtacagagctacggttcccgctgcgtgaagccaccgattgtcattggtgacattagccgcccggcaccgattaccgtggagtgggcgaagtatgcgcaaagcctgaccgacaaaccggtgaaagggatgctgacggggccggtgaccatactctgctggagcttcccgcgtgaagatgtcagccgtgaaaccatcgccaaacagattgcgctggcgctgcgtgatgaagtggccgatctggaagccgctggaattggcatcatccagattgacgaaccggcgctgcgcgaaggtttaccgctgcgtcgtagcgactgggatgcgtatctccagtggggcgtagaggccttccgtatcaacgccgccgtggcgaaagatgacacacaaatccacactcacatgtgttattgcgagttcaacgacatcatggatagcattgcggcgctggacgcagacgtcatcaccatcgaaaccagccgttccgacatggagttgctggagagctttgaagagtttgattatccaaatgaaatcggtcctggcgtctatgacattcacagcccaaacgtaccgagcgtggaatggattgaagccttgctgaagaaagcggcaaaacgcattccggcagagcgcctgtgggtcaacccggactgtggcctgaaaacgcgcggctggccagaaacccgcgcggcactggcgaacatggtgcaggcggcgcagaacttgcgtcgggggtaaaatccaaaccgggtggtaataccacccggtcttttctcattacaggctcttcttcccaccatactgcttaaaccattccagcatacgctgccagccatcttctgcagatgcggcatgatagctcgggcgataatcagcgttgaatgcatgcccggcgtccgggtacacgataatctctgctttcgcattagcagcccgcagcgcctggcgcatggtttcaacgctctcctgcggaatgctgttatcctgaccaccatataagccgagaatcggcgcgttaagatcggttgcgatatcaacaggttgtttcggactattcaggctcttgtcgcccgtcagtttgccgtaccacgccactgcggcttttagctgtggattatgcgcggcatacagccaggtgatacgtccaccccagcagaatccggtgatcattaaacgatgaacatcgccgccgttgcgggaagcccaactggcgacatgatcgagatcggccagcacctggctgtcaggcacttttgctaccagaccgctaagcaacgtggggatatcggcaaaatcattcggatcgccttcgcggaagtaaagttcaggtgcgatagccagatacccctccagcgccagacggcgacaaatgtcgcggatatgttcatgcacgccaaaaatttcctgcactacaatgaccactggcagtgggccatcgctttgctttggtctggcatggtaagcaggcatgttatccccttgactagggatagaggtgaagcccgccacaatcgcgtcgtccggggtctgaacgatggtgctagcgagagggcttgcagcaggtgcaaatccagattgttgtgttgttgccatggtattctccgtacccttataaaaatgttgcgcaatgttaactatagtcagcatgcaacaaatcacattgcctgaatcggctcatcttttatgcagtcctgcagaatgaagggtgatttatgtgatttgcatcacttttggtgggtaaatttatgcaacgcatttgcgtcatggtgatgagtatcacgaaaaaatgttaaacccttcggtaaagtgtctttttgcttcttctgactaaaccgattcacagaggagttgtatatgtccaagtctgatgtttttcatctcggcctcactaaaaacgatttacaaggggctacgcttgccatcgtccctggcgacccggatcgtgtggaaaagatcgccgcgctgatggataagccggttaagctggcatctcaccgcgaattcactacctggcgtgcagagctggatggtaaacctgttatcgtctgctctaccggtatcggcggcccgtctacctctattgctgttgaagagctggcacagctgggcattcgcaccttcctgcgtatcggtacaacgggcgctattcagccgcatattaatgtgggtgatgtcctggttaccacggcgtctgtccgtctggatggcgcgagcctgcacttcgcaccgctggaattcccggctgtcgctgatttcgaatgtacgactgcgctggttgaagctgcgaaatccattggcgcgacaactcacgttggcgtgacagcttcttctgataccttctacccaggtcaggaacgttacgatacttactctggtcgcgtagttcgtcactttaaaggttctatggaagagtggcaggcgatgggcgtaatgaactatgaaatggaatctgcaaccctgctgaccatgtgtgcaagtcagggcctgcgtgccggtatggtagcgggtgttatcgttaaccgcacccagcaagagatcccgaatgctgagacgatgaaacaaaccgaaagccatgcggtgaaaatcgtggtggaagcggcgcgtcgtctgctgtaattctcttctcctgtctgaaggccgacgcgttcggccttttgtatttttgcgtagcgcctcgcaggaaatgcctttccaactggacgtttgtacagcacaattctattttgtgcgggtaagttgttgcgtcaggaggcgttgtggatttcagtatcatggtttacgcagttattgcgttggtgggtgtggcaattggctggctgtttgccagttatcaacatgcgcagcaaaaagccgagcaattagctgaacgtgaagagatggtcgcggagttaagcgcggcaaaacaacaaattacccaaagcgagcactggcgtgcagagtgcgagttactcaataacgaagtgcgcagcctgcaaagtattaacacctctctggaggccgatctgcgtgaagtaaccacgcggatggaagccgcacagcaacatgctgacgataaaattcgccagatgattaacagcgagcagcgcctcagtgagcagtttgaaaacctcgccaaccgtatttttgagcacagcaatcgccgggttgatgagcaaaaccgtcagagtctgaacagcctgttgagcccgctacgtgaacaactggacggtttccgccgtcaggttcaggacagcttcggtaaagaagcacaagaacgccataccctgacccacgaaattcgcaatctccagcaactcaacgcgcaaatggcccaggaagcgatcaacctgacgcgcgcgctgaaaggcgacaataaaacccagggcaactggggcgaggtagtattgacgcgggtgttggaggcttccggtctgcgtgaagggtatgaatatgaaacccaggtcagcatcgaaaatgacgcccgcagccggatgcagccggatgtcatcgtgcgcctgccgcagggaaaagatgtggtgatcgacgccaaaatgacgctggtcgcctatgaacgctattttaacgccgaagacgactacacccgcgaaagcgcgctacaggaacatatcgcgagcgtgcgtaaccatatccgtttgctgggacgcaaagattatcaacagctgccggggctgcgaactctggattacgtgctgatgtttattcccgttgaacccgcttttttactggcgcttgaccgccagccggagctgatcaccgaagcgttgaaaaacaacatcatgctggttagcccgactacgctgctggtggcgctgcgcactatcgccaacctgtggcgttatgagcatcaaagccgcaacgcccagcaaatcgccgatcgtgccagcaagctgtacgacaagatgcgtttgttcatcgatgacatgtccgcgattggtcaaagtctcgacaaagcgcaggataattatcggcaggcaatgaaaaaactctctagtgggcgcggaaatgtgctggcgcaggcagaagcgtttcgcggtttaggagtagaaattaaacgcgagattaatccggatttggctgaacaggcggtgagccaggatgaagagtatcgacttcggagcgttccggagcagccgaatgatgaagcttatcaacgcgatgatgaatataatcagcagagccgctaacccattgggagtagttaagccgggtagaaatctagggcatcgacgcccaatctgttacacttctggaacaattttttgatgagcaggcattgagatggtggataagagtcaagaaacgacgcactttggttttcagaccgtcgcgaaggaacaaaaagcggatatggtcgcccacgttttccattccgtggcaagtaaatacgatgtcatgaatgatttgatgagttttggtattcatcgtttgtggaagcgattcacgattgattgcagcggcgtacgccgtgggcagaccgtgctggatctggctggtggcaccggcgacctgacagcgaaattctcccgcctggtcggagaaactggcaaagtggtccttgctgatatcaatgaatccatgctcaaaatgggccgcgagaagctgcgtaatatcggtgtgattggcaacgttgagtatgttcaggcgaacgctgaggcgctgccgttcccggataacacctttgattgcatcaccattagctttggtctgcgtaacgtcaccgacaaagataaagcactgcgtagtatgtatcgcgtgctgaaacccggcggccgcctgctggtgcttgagttcagcaagccaattatcgagccgctgagcaaagcctatgatgcatactccttccatgtgctgccgcgtattggcagtctggtcgcgaacgacgccgacagctaccgttatctggcagaatccatccgtatgcatcccgatcaggataccctgaaagccatgatgcaggatgccggattcgaaagtgtcgactactacaatctgacggcaggggttgtggcgctgcatcgtggttataagttctgacaggagaccggaaatgccttttaaacctttagtgacggcaggaattgaaagtctgctcaacaccttcctgtatcgcagtcccgcgctgaaaacggcccgcagccgtctgctgggtaaagtattgcgcgtggaggtaaaaggctttagcacgagtttgattctggtgttcagcgaacgccaggttgatgtactgggcgaatgggcaggcgatgctgactgcaccgttatcgcctacgccagtgtgttgccgaaacttcgcgatcgccagcagcttaccgcactgattcgcagtggtgagctggaagtgcagggcgatattcaggtggtgcaaaacttcgttgcgctggcagatctggcagagttcgaccctgcggaactgctggccccttataccggtgatatcgccgctgaaggaatcagcaaagccatgcgcggaggcgcaaagttcctgcatcacggcattaagcgccagcaacgttatgtggcggaagccattactgaagagtggcgtatggcacccggtccgcttgaagtggcctggtttgcggaagagacggctgccgtcgagcgtgctgttgatgccctgaccaaacggctggaaaaactggaggctaaatgacgccaggtgaagtacggcgcctatatttcatcattcgcacttttttaagctacggacttgatgaactgatccccaaaatgcgtatcaccctgccgctacggctatggcgatacagtttattctggatgccaaatcggcataaagacaaacttttaggtgagcgactacgactggccctgcaagaactggggccggtttggatcaagttcgggcaaatgttaagtacccgccgcgatctttttccaccgcatattgccgatcagctggcgttattgcaggacaaagttgctccgtttgatggcaagctggcgaagcagcagattgaagctgcaatgggcggcttgccggtagaagcgtggtttgacgattttgaaatcaagccgctggcttctgcttctatcgcccaggttcataccgcgcgattgaaaagcaatggtaaagaggtggtgattaaagtcatccgcccggatattttgccggttattaaagcggatctgaaacttatctaccgtctggctcgctgggtgccgcgtttgctgccggatggtcgccgtctgcgcccaaccgaagtggtgcgcgagtacgaaaagacattgattgatgaactgaatttgctgcgggaatctgccaacgccattcagcttcggcgcaattttgaagacagcccgatgctctacatcccggaagtttaccctgactattgtagtgaagggatgatggtgatggagcgcatttacggcattccggtgtctgatgttgcggcgctggagaaaaacggcactaacatgaaattgctggcggaacgcggcgtgcaggtgttcttcactcaggtctttcgcgacagctttttccatgccgatatgcaccctggcaacatcttcgtaagctatgaacacccggaaaacccgaaatatatcggcattgattgcgggattgttggcagcctaaacaaagaagataaacgctatctggcagaaaactttatcgccttctttaatcgcgactatcgcaaagtggcagagctacacgtcgattctggctgggtgccaccagataccaacgttgaagagttcgaatttgccattcgtacggtctgtgaacctatctttgagaaaccgctggccgaaattagctttggacatgtactgttaaatctgtttaatacggcgcgtcgcttcaatatggaagtgcagccgcaactggtgttactccagaaaaccctgctctacgtcgaaggggtaggacgccagctttatccgcaactcgatttatggaaaacggcgaagcctttcctggagagctggattaaagatcaggtcggtattcctgcgctggtgagagcatttaaagaaaaagcgccgttctgggtcgaaaaaatgccagaactgcctgaattggtttacgacagtttgcgccagggcaagtatttacagcacagtgttgataagattgcccgcgagcttcagagtaatcatgtacgtcagggacaaagccgttattttctcggaattggcgctacgttagtattaagtggcacattcttgttggtcagccgacctgaatgggggctgatgcccggctggttaatggcaggtggtctgatcgcctggtttgtcggttggcgcaaaacacgctgattttttcatcgctcaaggcgggccgtgtaacgtataatgcggctttgtttaatcatcatctaccacagaggaacatgtatgggtggtatcagtatttggcagttattgattattgccgtcatcgttgtactgctttttggcaccaaaaagctcggctccatcggttccgatcttggtgcgagcatcaaaggctttaaaaaagcaatgagcgatgatgaaccaaagcaggataaaaccagtcaggatgctgattttactgcgaaaactatcgccgataagcaggcggatacgaatcaggaacaggctaaaacagaagacgcgaagcgccacgataaagagcaggtgtaatccgtgtttgatatcggttttagcgaactgctattggtgttcatcatcggcctcgtcgttctggggccgcaacgactgcctgtggcggtaaaaacggtagcgggctggattcgcgcgttgcgtagtctggcgacaacggtgcagaacgaactgacccaggagttaaaactccaggagtttcaggacagtctgaaaaaggttgaaaaggcgagcctcactaacctgacgcccgaactgaaagcgagcatggatgaactacgccaggccgcggagagcatgaagcgttcctacgttgcaaacgatcctgaaaaggcgagcgatgaagcgcacaccatccataacccggtggtgaaagataatgaagctgcgcatgagggcgtaacgcctgccgctgcacaaacgcaggccagtagcccggaacagaagccagaaaccacgccagagccggtggtaaaacctgctgcggacgctgaaccgaaaaccgctgcaccttcccctagcagcagtgataaaccgtaaacatgtctgtagaagatactcaaccgcttatcacgcatctgattgagctgcgtaagcgtctgctgaactgcattatcgcggtgatcgtgatattcctgtgtctggtctatttcgccaatgacatctatcacctggtatccgcgccattgatcaagcagttgccgcaaggtagtacgatgatcgccaccgacgtggccagcccgttctttacgccgatcaagctgacctttatggtgagcctgattctgagtgcgccggtgattctctatcaggtgtgggcatttatcgccccagcgctgtataagcatgaacgtcgcctggtggtgccgctgctggtttccagctctctgctgttttatatcggcatggcattcgcctactttgtggtctttccgctggcatttggcttccttgccaataccgcgccggaaggggtgcaggtatccaccgacatcgccagctatttaagcttcgttatggcgctgtttatggcgtttggtgtctcctttgaagtgccggtagcaattgtgctgctgtgctggatggggattaccagcccagaagacttacgcaaaaaacgcccgtatgtgctggttggtgcattcgttgtcgggatgttgctgacgccgccggatgtcttcagccaaacgctgttggcgatcccgatgtactgtctgtttgaaatcggtgtcttcttcagtcgcttttacgttggtaaagggcgaaatcgggaagaggaaaacgacgctgaagcagaaagcgaaaaaactgaagaataaattcaaccgcccgtcagggcggttgtcatatggagtacaggatgtttgatatcggcgttaatttgaccagtagccaatttgcgaaagaccgtgatgatgttgtagcgtgcgcttttgacgcgggagttaatgggctactcatcaccggcactaacctgcgtgaaagccagcaggcgcaaaagctggcgcgtcagtatagctcctgttggagtacggcgggcgtacatcctcacgacagcagccagtggcaagctgcgactgaagaagcgattattgagctggccgcgcagccagaagtggtggcgattggtgaatgtggtctcgactttaaccgcaactttagcacgccggaagagcaggaacgcgcttttgttgcccagctacgcattgccgcagatttaaacatgccggtatttatgcactgtcgcgatgcccacgagcggtttatgacattgctggagccgtggctggataaactgcctggtgcggttcttcattgctttaccggcacacgcgaagagatgcaggcgtgcgtggcgcatggaatttatatcggcattaccggttgggtttgcgatgaacgacgcggactggagctgcgggaacttttgccgttgattccggcggaaaaattactgatcgaaactgatgcgccgtatctgctccctcgcgatctcacgccaaagccaagttcccggcgcaacgagccagcccatctgccccatattttgcaacgtattgcgcactggcgtggagaagatgccgcatggctggctgccaccacggatgctaatgtcaaaacactgtttgggattgcgttttaaagtttgcggaactcggtattcttcacactgtgcttaatctctttattaataagattaagcaatagcatggagcgagcctcaccatcgggttcggtgaaaatggcctgaaagccttcgaacgcgccttcggtaataatcaccttatcacccggataaggggttgccggatcgacaatgtctttcggtttatatacgcttagctgatgaataaccgcgcttgggactatcgctgggctcgcgccaaagcgcacgaagtggctgacaccgcgggtcgcgttgatagtcgtggtatgaatcacttctgggtcaaattccacaaacaggtagttggggaacaatggctcactgactgcagtacgttttccacgcacgattttttccagggtgatcatcggtgccaggcaattcacagcctgtctttcgaggtgttcctgggcacgttgaagttgcccgcgcttgcagtacagtaaataccaggattgcataatgactcttatccgtttaatcggggcgcaaggatagcaaaagctttacgctaagttaattatattccccggtttgcgttataccgtcagagttcacgctaatttaacaaatttacagcatcgcaaagatgaacgccgtataatgggcgcagattaagaggctacaatggacgccatgaaatataacgatttacgcgacttcttgacgctgcttgaacagcagggtgagctaaaacgtatcacgctcccggtggatccgcatctggaaatcactgaaattgctgaccgcactttgcgtgccggtgggcctgcgctgttgttcgaaaaccctaaaggctacagtatgccggtgctgtgcaacctgttcggtacgccaaagcgcgtggcgatgggcatggggcaggaagatgttagcgcgctgcgtgaagttggtaaattattggcgtttctgaaagagccggagccgccaaaaggtttccgcgacctgtttgataaactgccgcagtttaagcaagtattgaacatgccgacaaagcggctgcgtggtgcgccctgccaacaaaaaatcgtctctggcgatgacgtcgatctcaatcgcattcccattatgacctgctggccggaagatgccgcgccgctgattacctgggggctgacagtgacgcgcggcccacataaagagcggcagaatctgggcatttatcgccagcagctgattggtaaaaacaaactgattatgcgctggctgagccatcgcggcggcgcgctggattatcaggagtggtgtgcggcgcatccgggcgaacgtttcccggtttctgtggcgctgggtgccgatcccgccacgattctcggtgcagtcactcccgttccggatacgcttagtgagtatgcgtttgccggattgctacgtggcaccaagaccgaagtggtgaagtgtatctccaatgatcttgaagtgcccgccagtgcggagattgtgctggaagggtatatcgaacaaggcgaaactgcgccggaagggccgtatggcgaccacaccggttactataatgaagtcgatagtttcccggtatttaccgtgacgcatattacccagcgtgaagatgcgatttaccattccacctataccgggcgtccgccagatgagcccgcggtgctgggtgtcgcactgaacgaagtgtttgtgccgattctgcaaaaacagttcccggaaattgtcgatttttacctgccgccggaaggctgctcttatcgcctggcggtagtgacaatcaaaaaacagtacgccggacacgcgaagcgcgtcatgatgggcgtctggagcttcttacgccagtttatgtacactaaatttgtgatcgtttgcgatgatgacgttaacgcacgcgactggaacgatgtgatttgggcgattaccacccgtatggacccggcgcgggatactgttctggtagaaaatacgcctattgattatctggattttgccagccctgtctccgggctgggtagtaaaatggggctggatgccacgaataaatggccgggggaaacccagcgtgaatggggacgtcccatcaaaaaagatccagatgttgtcgcgcatattgacgccatctgggatgaactggctatttttaacaacggtaaaagcgcctgatgcgcgtttgttttgccctatttatcgatccgacagagaaagcgcatgacaaccttaagctgtaaagtgaccagcgtagaagctatcacggataccgtatatcgtgtccgcatcgtgccagacgcggccttttcttttcgtgctggtcagtatttgatggtagtgatggatgagcgcgacaaacgtccgttcagtatggctagcacgccggatgaaaaagggtttatcgagctgcatattggcgcttctgaaatcaacctttacgcgaaagcagtcatggaccgcatcctcaaagatcatcaaatcgtggtcgacattccccacggagaagcgtggctgcgcgatgatgaagagcgtccgatgattttgattgcgggcggcaccgggttctcttatgcccgcagcattttgctgacagcgttggcgcgtaacccaaaccgtgatatcaccatttactggggcgggcgtgaagagcagcatctgtatgatctctgcgagcttgaggcgcttagcttgaagcatcctggtctgcaagtggtgccggtggttgaacaaccggaagcgggctggcgtgggcgtactggcaccgtgttaacggcggtattgcaggatcacggtacgctggcagagcatgatatctatattgccggacgttttgagatggcgaaaattgcccgcgatctgttttgcagtgagcgtaatgcgcgggaagatcgcctgtttggcgatgcgtttgcatttatctgagatataaaaaaacccgcccctgacaggcgggaagaacggcaactaaactgttattcagtggcatttagatctatgacgtatctggcaaaccatgcccgatgcgacgctgtcgcgtcttatcgtgcctacaaatagtccgaaccgtaggccggataaggcgtttacgccgcatccggcaattggtgcatgatgcctgatgcgacgctgtcgcgtcttatcgtgcctacaaatagtccgaaccgtaggccggataaggcgtttacgccgcatccggcaattggtgcatgatgcctgatgcgacgctggcgcgtcttatcaggcctacattggtgccggatcggtagaccggataaggcgttcacgccgcatccggcaagtggttaaacccgctcaaacaccgtcgcaataccctgacccagaccgatacacatcgtcgccagaccaaactgaacgtctttgcgttccatcagattcagcagcgtggtgctgatacgcgcaccggaacaacccagcggatgacccagcgcgatcgcgccaccgttgaggttgatcttctcgtcaatctgctcaattagtcccagatctttaatacatggcaggatctgcgcggcaaaggcttcgttcatttcaaacacgccgatatcgctggcagaaagccccgcttttttcagcgccagtttgctggccggaaccgggccgtaacccataatgcttgggtcacaaccaacgaccgccatgctacgcacacgagcgcgcggcttaagacctaattcatgggcgcggctttcactcatcaccagcatggcagctgcgccatcggaaagtgcagaagatgtgcccgccgttaccataccgtttactggatcaaacgccggacgcagcgtggcgagggcttccacggtggtttccgggcgaatcacttcgtcgtaattaaactgcttcaggacgccgtcggcatcgtgaccaccggtcgggatgatttcatttttaaatgcggcgctctgcgtggcggcccaggcgcgggcgtgactccgcgcggcaaaggcatcctgcatttcacggctgataccgtgcatacgcgccagcatttctgccgttaagcccatcatgcccgccgctttggcgacattgcggctcaggccggggtgaaaatcgacgccgtgactcatcggcacatggcccatatgctccacgccgccaaccagacatgcctgcgcatcgccagtcatgatcattcgtgctgcgtcatgcagtgcctgcatggaactaccacacaagcgattaacggtaaccgccgggacagagtgtggtacttctgccagcagcgccgcgttacgggcgatattaaaaccctgctccagcgtctgctgcacacaaccccagtaaatatcgtcgagggccgccgcttccagcgccgggttacgcgccagcaggctacgcattaaatgagcggagagatcttctgcacgcacgttacgaaaagcaccgcccttgctacggcccatcggggtgcgaattgcatcgacaatgacaacctgttccattgtgactccttaagccgttttcaggtcgccaaccggacgggctggctcaaccggaggatagtacggttcgttatgacgcgctttattacgcagaccttccggcacttcatacagcgggccgaggtgctgatattgctgtgccatatcgaggtattttgcgctaccgagggtgtccagccagcggaacgcgccgccgtggaacggagggaagcccaggccgtagaccagcgccatatccgcttccgccggagtggcgataatgccttcctccagacagcgcaccacttcgttgaccatcgggatcatcatgcgggcgataatctcttcttcgctgaagtcgcgcttcggctggctcacttctgccagcaggtcttcaacggcggcgtcttcttctttcttcggcttacctttgctgtcttctttataacgccagaaaccgaggccgttcttctgaccaaagcggttggcatcaaacagcgcgtcgatggcatcgcggtaatctttctgcatccgctgcgggaagcctgctgccatgacagcctgagcgtgatgcgcggtatcaatgcccacaacgtccagcagatatgccgggcccatcggccagccaaactgtttttccatcactttgtcgatcttgcggaaatccgcgccgtcgcgcagcagctggctgaaaccggcgaaatacgggaacagcacgcggttaacaaagaagccggggcagtcgttaaccacaatcggcgtcttgcccatcttgctcgcccaggcgacaactttcgcgatggtttcgtcggagcttttctcgccgcgaataatttctaccaacggcattcggtggaccgggttaaagaagtgcatcccgcagaagttttccgggcgttccagcgcgttggccagttcgctgataggaatggtactagtgttagacgccagcacggtatcctggcgtactttttgttcggtttctgccagtacggcttttttcactttcgggttttcaacaaccgcttctaccacaatatccacgcggtcaaatccggcgtagtcgagcgttgggtggattgtggagatcacgccagccagtttcagaccatcgatcttgccgcgctcaagctgcttgttcagcagtttcgcggcttcggtcatgccgagggttaagctcttgtcgttgatatctttcatgacaaccggcacgcctttccacgcagactggtaagcgatgccgccgcccataatgcctgcacccagcaccgcggcctgtttcggggtttcaacgtctttggtgagtttcttcgctttgccttttacatattgatcgttaaggaaaatgccgaccagtgcgcgggcttcgttggtatgcgccagcgggacaaaacttttgttttccaggtttaaggcttcttcacgaccaaaacgggccgcagcttcaatggtttttactgcggtgatgggggccggataatgtttccccgctgtttgtgcgaccatccctttagcgatggtgaagctcatggtggcttcaatcttgctcagttttagtggttccagcttcggctgacgttttgctttccagtcgaggtcgccgttaatggcctggcgtaaaaccgcctttgcgccttcaaccagtttttctgctttgactacgccatccaccagaccgattttcagcgcctgatccgcgccgacatctttaccggcggcaatgatttccagcgcactgtcagcgcccagcatacgtggcatacgtacagaaccgccaaagccaggcatgatgcccagtttggtttccggcagaccgatgcgcagatccggcgtcgccagacgataatcggtcgccagcacgcattcgcagccaccgcccagcgcatagccattgacggcagcaatggtcggcaccggcagatcttccaggcgattaaacacgctattggcaaagtgcagccactgacttaactgttcttcaggaacgaggaacagggacaaaaattcggtgatatcagcaccgacgataaaggctgctttgttgctacgcagcagcagcccttttagatcactttgctgttccagcacgccgatggcctcgccgaggctggcgacggtcgcagtgtcgagtttattaacactacctggggcatcaaataccagttcggcaatgccatcttccagccagtcaaggtacagggtgtcgcctttgtaaagcatgtcagtctcctgaatccgcaaggtgatctggtcgtaccagatgagtcgaagtgtgtattttgtgttaaaaatatgcaaacaaaagattaaagaaatgccgatctgatcacgctcggcagaaatcacgctctggatgaacgatgtgctaagatgcggagacttaaggtcaaaaaaacagaagggtaaaaaatggaaagtctggccagcctctataaaaatcatatagctaccttacaagaacggactcgcgatgcgctggcgcgcttcaagctggatgcgttacttattcactccggcgagctgttcaatgtttttctcgacgatcatccctatccgtttaaagtgaacccgcaattcaaagcgtgggtgccggtaactcaggtgccaaactgctggttgctggtggatggcgtgaacaagccgaaactgtggttctatctgccggttgattactggcacaacgtcgaaccgctgccgacctctttctggactgaagatgtggaagtgatcgcgctgccgaaagccgatggcattggtagcctgctgcctgctgcgcgcggcaatatcggttatatcggtccggtgccggaacgtgcgctgcaactgggtattgaggccagcaacatcaacccgaaaggggttatcgactacctgcattactatcgctccttcaaaactgagtacgaactggcctgtatgcgtgaagcgcagaaaatggcggtcaacggtcaccgcgcggcagaagaagcgttccgttctggcatgagcgagttcgatatcaacattgcctatctgaccgcgaccggtcatcgtgataccgacgtaccttacagcaacattgtggcgcttaacgaacacgctgcggtactgcattacaccaaactggaccatcaggcaccggaagagatgcgcagcttcctgctggatgccggggcagaatataacggctatgcggctgacctgacccgtacctggagcgcaaaaagtgacaacgactacgcgcagctggtgaaggacgttaatgatgaacaactggcgctgatcgccaccatgaaagcaggcgtcagctatgtggattaccacatccagttccatcagcgcatcgccaaactgctgcgtaaacatcaaatcatcaccgatatgagtgaagaagcgatggtcgaaaacgatcttaccgggccgtttatgccgcatggtatcggccatccgctgggcctgcaggtgcatgacgtcgctggttttatgcaggatgatagcggtacgcacctcgcggcaccggcaaaatatccgtacctgcgctgcacccgtattctccagccgggcatggtgttaaccatcgaaccgggtatctacttcatcgaaagcctactggcaccgtggcgtgaagggcagttcagcaagcacttcaactggcagaaaattgaagcactgaaaccgttcggcggcattcgtatcgaagacaacgtggtgatccacgaaaacaacgtggaaaacatgacccgggatctgaaactggcgtgatggaaagctggttaattcctgcggcaccggtcacggtcgttgaagagatcaaaaagagccgcttcataacgatgttggcgcataccgatggcgttgaggcggcgaaagcgtttgttgaaagcgtgcgggcagaacaccccgatgcccggcaccattgcgtggcgtgggtcgcgggtgcgccggatgattctcaacagctgggtttctctgacgacggggagccggcgggaacggcaggtaaaccgatgctcgcccagctaatgggcagcggcgtcggggaaattaccgctgtggtagtgcgctactacggcggcatattgcttggcaccggtgggttagtgaaagcgtatggcggcggcgtgaatcaggcgctgcgccagctaacgacccaacgcaagacgccattaaccgaatatactttgcaatgtgaatatcatcagttaaccggcattgaagcgttgctggggcagtgtgacggcaaaattatcaacagtgattatcaggcattcgttctgctgcgggtggcgcttccggcggcgaaagtggctgaattttccgcaaagctggcggattttagccgtggtagtttgcaattgttagcgattgaagaataatccccacttcgttttgcagaactaaggaagcggcagagatgcattttcgcgccattacccgaatcgttggactactggtcatcttatttagtgggaccatgattatccctgggctggtagcactcatctaccgggatggagcgggccgcgcttttacccagaccttttttgtcgccctcgccattggctctatgctgtggtggccgaaccgcaaagagaaaggcgaacttaaatcccgtgaggggtttctgatagtggtgctgttctggaccgtgctgggtagcgtcggtgcgctcccttttatcttcagcgaaagcccgaacctcacgattaccgatgcgttttttgaatctttctctggcctgaccactacgggagccactacgctggtggggctggatagcctccctcacgccatcctcttttatcgccagatgctgcaatggtttggcgggatggggatcatcgtgttggcggttgcgatactgcctatcctcggcgtgggtgggatgcagctctatcgcgcagaaatgcccggcccgctgaaagataacaaaatgcgcccgcgaattgcggaaacggcgaaaaccctgtggttgatttatgtcttgctgaccgtcgcctgtgcgctggcgttgtggtttgccggaatggatgcctttgatgccatcggccatagctttgcgactatcgctattggcggcttcagcacacatgatgccagtatcggttatttcgatagcccgactattaacactatcattgctatcttcctgctgatctccggctgtaactacggtctgcactttagtctgttaagtgggcgtagtctgaaggtttattggcgcgatccggaatttcgcatgtttatcggcgtacagtttacgctggtggttatttgtaccctcgtactgtggtttcataatgtctacagtagcgcgctgatgacaattaaccaggcgtttttccaggtggtgagcatggcgacaaccgccgggtttacaactgacagcattgcccgctggccgctctttttgccggtactgcttttatgtagtgcctttatcggcggttgcgccgggagtacgggcggtggcctgaaggtgatccgcatcctgctgctgtttaagcaggggaaccgtgagctgaaacgactggtgcatccgaacgccgtctatagcattaagctggggaatcgcgcactgccggaacgtatcctcgaagccgtttggggatttttctccgcctatgcattggtgtttattgtcagtatgctggcgattatcgccacgggcgtggatgacttttctgcctttgcgagcgttgttgcgacattgaataacctggggccagggcttggcgtggttgctgataactttaccagtatgaacccggtggctaaatggatcctgattgccaacatgctgtttggtcgtctcgaggtctttacattgctggtgctctttaccccgactttctggcgtgaatgatggagtaatacgtgaaaacattaattcttttcagtacaagggacggacaaacgcgcgagattgcctcctacctggctagcgaactgaaagaactggggatccaggcggatgtcgccaatgtgcaccgcattgaagaaccacagtgggaaaactatgaccgtgtggtcattggtgcttctattcgctatggtcactaccatagtgcgttccaggaatttgtcaaaaaacatgcgacgcggctgaatagcatgccgagcgccttttactccgtgaatctggtggcgcgcaaaccggagaagcgtactccacagaccaacagctacgcgcgcaagtttctgatgaacagccaatggcgtcccgatcgctgcgcggtcattgccggggcgctgcgttacccacgttatcgctggtacgaccgttttatgatcaagctgattatgaagatgagtggcggtgaaacggatacgcgcaaagaagttgtctataccgattgggagcaggtggcgaatttcgcccgagaaatcgcccatttaaccgacaaaccgacgctgaaataagcataaagaataaaaaatgcgcggtcagaaaattattttaaatttcctcttgtcaggccggaataactccctataatgcgccaccactgacacggaacaacggcaaacacgccgccgggtcagcggggttctcctgagaactccggcagagaaagcaaaaataaatgcttgactctgtagcgggaaggcgtattatgcacaccccgcgccgctgagaaaaagcgaagcggcactgctctttaacaatttatcagacaatctgtgtgggcactcgaagatacggattcttaacgtcgcaagacgaaaaatgaataccaagtctcaagagtgaacacgtaattcattacgaagtttaattctttgagcgtcaaacttttaaattgaagagtttgatcatggctcagattgaacgctggcggcaggcctaacacatgcaagtcgaacggtaacaggaagaagcttgcttctttgctgacgagtggcggacgggtgagtaatgtctgggaaactgcctgatggagggggataactactggaaacggtagctaataccgcataacgtcgcaagaccaaagaggggtaccttcgggcctcttgccatcggatgtgcccagatgggattagctagtaggtggggtaacggctcacctaggcgacgatccctagctggtctgagaggatgaccagccacactggaactgagacacggtccagactcctacgggaggcagcagtggggaatattgcacaatgggcgcaagcctgatgcagccatgccgcgtgtatgaagaaggccttcgggttgtaaagtactttcagcggggaggaagggagtaaagttaatacctttgctcattgacgttacccgcagaagaagcaccggctaactccgtgccagcagccgcggtaatacggagggtgcaagcgttaatcggaattactgggcgtaaagcgcacgcaggcggtttgttaagtcagatgtgaaatccccgggctcaacctgggaactgcatctgatactggcaagcttgagtctcgtagaggggggtagaattccaggtgtagcggtgaaatgcgtagagatctggaggaataccggtggcgaaggcggccccctggacgaagactgacgctcaggtgcgaaagcgtggggagcaaacaggattagataccctggtagtccacgccgtaaacgatgtcgacttggaggttgtgcccttgaggcgtggcttccggagctaacgcgttaagtcgaccgcctggggagtacggccgcaaggttaaaactcaaatgaattgacgggggcccgcacaagcggtggagcatgtggtttaattcgatgcaacgcgaagaaccttacctggtcttgacatccacggaagttttcagagatgagaatgtgccttcgggaaccgtgagacaggtgctgcatggctgtcgtcagctcgtgttgtgaaatgttgggttaagtcccgcaacgagcgcaacccttatcctttgttgccagcggtccggccgggaactcaaaggagactgccagtgataaactggaggaaggtggggatgacgtcaagtcatcatggcccttacgaccagggctacacacgtgctacaatggcgcatacaaagagaagcgacctcgcgagagcaagcggacctcataaagtgcgtcgtagtccggattggagtctgcaactcgactccatgaagtcggaatcgctagtaatcgtggatcagaatgccacggtgaatacgttcccgggccttgtacacaccgcccgtcacaccatgggagtgggttgcaaaagaagtaggtagcttaaccttcgggagggcgcttaccactttgtgattcatgactggggtgaagtcgtaacaaggtaaccgtaggggaacctgcggttggatcacctccttaccttaaagaagcgttctttgaagtgctcacacagattgtctgatgaaaatgagcagtaaaacctctacaggcttgtagctcaggtggttagagcgcacccctgataagggtgaggtcggtggttcaagtccactcaggcctaccaaatttgcacggcaaatttgaagaggttttaactacatgttatggggctatagctcagctgggagagcgcctgctttgcacgcaggaggtctgcggttcgatcccgcatagctccaccatctctgtagtgattaaataaaaaatacttcagagtgtacctgcaaaggttcactgcgaagttttgctctttaaaaatctggatcaagctgaaaattgaaacactgaacaacgaaagttgttcgtgagtctctcaaattttcgcaacacgatgatgaatcgaaagaaacatcttcgggttgtgaggttaagcgactaagcgtacacggtggatgccctggcagtcagaggcgatgaaggacgtgctaatctgcgataagcgtcggtaaggtgatatgaaccgttataaccggcgatttccgaatggggaaacccagtgtgtttcgacacactatcattaactgaatccataggttaatgaggcgaaccgggggaactgaaacatctaagtaccccgaggaaaagaaatcaaccgagattcccccagtagcggcgagcgaacggggagcagcccagagcctgaatcagtgtgtgtgttagtggaagcgtctggaaaggcgtgcgatacagggtgacagccccgtacacaaaaatgcacatgctgtgagctcgatgagtagggcgggacacgtggtatcctgtctgaatatggggggaccatcctccaaggctaaatactcctgactgaccgatagtgaaccagtaccgtgagggaaaggcgaaaagaaccccggcgaggggagtgaaaaagaacctgaaaccgtgtacgtacaagcagtgggagcacgcttaggcgtgtgactgcgtaccttttgtataatgggtcagcgacttatattctgtagcaaggttaaccgaataggggagccgaagggaaaccgagtcttaactgggcgttaagttgcagggtatagacccgaaacccggtgatctagccatgggcaggttgaaggttgggtaacactaactggaggaccgaaccgactaatgttgaaaaattagcggatgacttgtggctgggggtgaaaggccaatcaaaccgggagatagctggttctccccgaaagctatttaggtagcgcctcgtgaattcatctccgggggtagagcactgtttcggcaagggggtcatcccgacttaccaacccgatgcaaactgcgaataccggagaatgttatcacgggagacacacggcgggtgctaacgtccgtcgtgaagagggaaacaacccagaccgccagctaaggtcccaaagtcatggttaagtgggaaacgatgtgggaaggcccagacagccaggatgttggcttagaagcagccatcatttaaagaaagcgtaatagctcactggtcgagtcggcctgcgcggaagatgtaacggggctaaaccatgcaccgaagctgcggcagcgacactatgtgttgttgggtaggggagcgttctgtaagcctgtgaaggtgtgctgtgaggcatgctggaggtatcagaagtgcgaatgctgacataagtaacgataaagcgggtgaaaagcccgctcgccggaagaccaagggttcctgtccaacgttaatcggggcagggtgagtcgacccctaaggcgaggccgaaaggcgtagtcgatgggaaacaggttaatattcctgtacttggtgttactgcgaaggggggacggagaaggctatgttggccgggcgacggttgtcccggtttaagcgtgtaggctggttttccaggcaaatccggaaaatcaaggctgaggcgtgatgacgaggcactacggtgctgaagcaacaaatgccctgcttccaggaaaagcctctaagcatcaggtaacatcaaatcgtaccccaaaccgacacaggtggtcaggtagagaataccaaggcgcttgagagaactcgggtgaaggaactaggcaaaatggtgccgtaacttcgggagaaggcacgctgatatgtaggtgaagcgacttgctcgtggagctgaaatcagtcgaagataccagctggctgcaactgtttattaaaaacacagcactgtgcaaacacgaaagtggacgtatacggtgtgacgcctgcccggtgccggaaggttaattgatggggttagccgcaaggcgaagctcttgatcgaagccccggtaaacggcggccgtaactataacggtcctaaggtagcgaaattccttgtcgggtaagttccgacctgcacgaatggcgtaatgatggccaggctgtctccacccgagactcagtgaaattgaactcgctgtgaagatgcagtgtacccgcggcaagacggaaagaccccgtgaacctttactatagcttgacactgaacattgagccttgatgtgtaggataggtgggaggctttgaagtgtggacgccagtctgcatggagccgaccttgaaataccaccctttaatgtttgatgttctaacgttgacccgtaatccgggttgcggacagtgtctggtgggtagtttgactggggcggtctcctcctaaagagtaacggaggagcacgaaggttggctaatcctggtcggacatcaggaggttagtgcaatggcataagccagcttgactgcgagcgtgacggcgcgagcaggtgcgaaagcaggtcatagtgatccggtggttctgaatggaagggccatcgctcaacggataaaaggtactccggggataacaggctgataccgcccaagagttcatatcgacggcggtgtttggcacctcgatgtcggctcatcacatcctggggctgaagtaggtcccaagggtatggctgttcgccatttaaagtggtacgcgagctgggtttagaacgtcgtgagacagttcggtccctatctgccgtgggcgctggagaactgaggggggctgctcctagtacgagaggaccggagtggacgcatcactggtgttcgggttgtcatgccaatggcactgcccggtagctaaatgcggaagagataagtgctgaaagcatctaagcacgaaacttgccccgagatgagttctccctgactccttgagagtcctgaaggaacgttgaagacgacgacgttgataggccgggtgtgtaagcgcagcgatgcgttgagctaaccggtactaatgaaccgtgaggcttaaccttacaacgccgaaggtgttttggcggattgagagaagattttcagcctgatacagattaaatcagaacgcagaagcggtctgataaaacagaatttgcctggcggcagtagcgcggtggtcccacctgaccccatgccgaactcagaagtgaaacgccgtagcgccgatggtagtgtggggtctcctcatgcgagagtagggaactgccaggcatcaaataaaacgaaaggctcagtcggaagactgggcctttcgttttatctgttgtttgtcggtgaacgctctcctgagtaggacaaatccgccgggagcggatttgaacgttgcgaagcaacggcccggagggtggcgggcaggacgcccgccataaactgccaggcatcaaattaagcagaaggccatcctgacggatggcctttttgcattggcgcagaaaaaaatgccggatgcgacgctggcgcgtcttatccagcctactcttgcttatccgttctgcttttgcatccactccaccacaaaatcagccagcccctcaacatcattaatatccagtaatgcgacatcaagattaagcggcacatcactggctacagcaataacatgcctgtctatcactaattcttcaggtcgatgtccggctccatcgcgaaacagcacaatctttgcgatctcttcatgcttaaacccttcgaccagaatcaaatccagcttactggtatccattcgacttgcgagaaactgtagatccagctcttcttcgtctggtgtttccgtcatcaaggcccatcgttgctggctggcaacgatggtttgtaccgcgccagccttgcgcagctcatagctatctttgcctggcttatcaacatccatatcatggtgcgtatgcttaatcagccctggacggatccctctggcgcataatgccgggatcagttttttcaaaagcgtagtttttccggtaccactccacgcggcaaaggcgagtaacggtatcatcgtttttcctgccatcgggcaagctcctctggcgtattcacgttaacaaatgcatctttatgatcgctgaaatcaaccgcatgaccgccagccagacgcataaataccattacccggcgttctcctgcttgcagatattccagtaataaaggctcaatagcgcggtttaccagagcaatagtcgggtgatcgcgttcaccgtcatggacccacacgacaggcgcatctttgcgctgatgattaagcctggctgctaaatcagggggaatgtaaggcgtatcgcacgggcaaaacaaaaaccactcaccagcttcctgctgcattacactaagcattcctgccagagggcctgggtaatccgccagactatcttcaatcactttcagaccgcttgcctgatagatttcctgatgacgattagcattaaccacgacgtgagagagctgcgtcataagcgcgtcagcgacatgttgccataatggtttgccgtttaattcaagcaatcctttatctacgccgcccattcgtctggctttaccgcctgccagcacaacgcctgttatcgtcgtcatcagattcaccgatatcgcctcttttattgtgggattgaccctgctaacgtgtctgtctcaagagtaaggagcatcactatgaaatgtaaacgtctgaatgaagttattgaactcctccagccagcctggcaaaaagagccagaccttaacctgctgcaatttttgcagaaactggcgaaagagagtggttttgacggcgaactggcggatttgacggatgacattctgatctatcacctgaaaatgcgtgattccgcgaaagatgcggtgatcccgggtttgcagaaagattatgaagaagacttcaaaacggcgctgttacgcgctcgcggcgtaattaaagagtaaaagcttgtaagcggcgccaccaaaatcatcgtgaaatgatatccttcgtcattcgtaatgttttccggatgatgggatgaataacagcgcttttactttccagacactacacccggataccatcatggacgctctgtttgagcatgggatccgggtggattccggtcttaccccgcttaacagctatgaaaaccgtgtctatcaatttcaggacgaagatcgtcgacgttttgtcgtcaaattttatcgccctgaacgttggacagccgatcaaatcctcgaagaacatcaatttgcgttgcagctggtaaatgatgaagttccggtcgcagcacctgtggcctttaacggtcagactttattgaatcatcagggattttatttcgctgtttttccaagcgtcggtggtcgccagttcgaagctgataatatcgatcagatggaagcggttgggcgttatttagggcgtatgcaccagacggggcgcaaacagctttttatccatcgcccgaccatcggtttgaacgaatatctcattgagccacgcaagctgtttgaggacgctacactgataccttccgggttgaaagcggcattcctgaaagcgacagatgagctgattgccgccgttacagcacactggcgggaagatttcaccgttctgcggctacatggagactgccacgccgggaatattctctggcgcgatggtccaatgtttgttgatctggatgatgcacgtaatggtccagccgttcaggatttgtggatgttgctcaatggcgataaagccgagcagcggatgcaactggaaactattattgaagcttatgaagaatttagcgagttcgacaccgctgaaatcggactgattgaacctttacgcgccatgcgtttggtttattatcttgcctggctaatgcggcgttgggctgatcccgcgttcccgaaaaatttcccgtggttaaccggggaagattactggctgcgacagacggcgacttttatagaacaggcaaaagttctacaagaaccccctttgcaattaacacctatgtattaatcggagagagtagatcatgaaaaagatttggctggcgctggctggtttagttttagcgtttagcgcaagcgcggcgcagtatgaagatggtaaacagtacactaccctggaaaaaccggtagctggcgcgccgcaagtgctggagtttttctctttcttctgcccgcactgctatcagtttgaagaagttctgcatatttctgataatgtgaagaaaaaactgccggaaggcgtgaagatgactaaataccacgtcaacttcatgggtggtgacctgggcaaagatctgactcaggcatgggctgtggcgatggcgctgggcgtggaagacaaagtgactgttccgctgtttgaaggcgtacagaaaacccagaccattcgttctgcttctgatatccgcgatgtatttatcaacgcaggtattaaaggtgaagagtacgacgcggcgtggaacagcttcgtggtgaaatctctggtcgctcagcaggaaaaagctgcagctgacgtgcaattgcgtggcgttccggcgatgtttgttaacggtaaatatcagctgaatccgcagggtatggataccagcaatatggatgtttttgttcagcagtatgctgatacagtgaaatatctgtccgagaaaaaataattcaatgtaaattacataaagcccgtgaatattcacgggctttttttattatttaataaatataaatacattctgataatgcatcctgccgctggacattatttcagcataagtggatattcaaagttttgctgttttatcagggaatatttatatgatacgtaagagtgctacaggtgttattgttgcgttagccgtaatctggggtggtggcacatggtacacaggtacgcaaattcagcctggtgtcgaaaaatttattaaagattttaacgatgctaaaaagaaaggtgaacatgcctacgatatgacgttaagttatcaaaattttgacaaaggcttttttaattcccgttttcaaatgcaaatgacattcgataacggtgcacccgatctcaatatcaagccaggccagaaagttgtatttgatgtggatgttgagcacggtccgttgcccatcacaatgttaatgcatggtaatgtcatcccagcactggcagcggcaaaagtgaacttagtgaataatgaactgacacaaccgctatttatcgccgcgaaaaataaaagccccgtggaagcgacattgcgattcgcgtttggtggcagtttctctacgacattagatgttgcccctgcagagtatggaaagttttcttttggtgagggccagtttacttttaatggtgatggtagtagtttgtctaacctggatattgaaggcaaagtcgaagatattgttctgcaattaagtccaatgaacaaagtaacggcaaaaagttttaccattgattctctggcgcgattagaagaaaagaaatttccggttggtgaaagcgagagcaaatttaatcagattaacattatcaatcacggggaagacgttgcccaaatcgatgctttcgttgcaaaaaccaggctggatcgcgttaaagacaaagattatatcaatgtcaatctcacctacgaacttgataagttaacaaaagggaatcagcaactcggtagtggtgagtggagtttgattgctgaatctattgatcccagtgcagtgcgccaatttatcatccagtataacattgcgatgcagaagcagcttgctgcacaccctgagttagcaaacgatgaagttgctctgcaagaagtgaatgctgcattgttcaaagagtatttaccgttattacaaaaaagtgagccgaccattaaacaaccggtaagatggaagaacgcactcggcgaactaaatgccaatctggatatcagtattgccgacccagccaaatctagtagttccacaaacaaagatatcaaaagcctcaattttgatgtgaagttaccgcttaatgtcgtcacagaaaccgcaaaacagcttaatttatctgaaggaatggatgcggaaaaagcgcaaaagcaggctgataaacaaatcagcgggatgatgacattaggtcagatgtttcagttaatcacgattgacaacaataccgccagcctgcagctgcgttatacaccgggtaaagttgtttttaacggacaggagatgagcgaagaagaatttatgtctcgtgccggacgttttgttcattaaaatactcactcgcctctgctcattcagaggcgagtaaaacttacttattctgacgctgactactcatgagagacgtcagaagccggtctttttcctgccacaaactgttcagccattgctgaaaatggcgcttaaagcttttgtcattgatgtagtcgccatgtaactcatcggcaataggctgtaaatccacatgtacgacaatccgcgtcagtttaccgcttaacatatcgaagaacggctgacggttattgtccggataacacagcgtaacattaagcagtttatcgaattgtttacccagtacatttagcgccatcgcaatgcctgccgcctttggtggcaacaagttttgaaaagtggagtgggtttgctgatgtttttcttgcgtgaaacgggagccttcaacgaaattgacaatggtggtgggatgcaggcgaaacttttcacaagaacgccgagtggtttcaacatctttaccacgtcgctccggatgacgtaataaataagcgcgggaataacgcttcataaacggcatatccaggctccagcacgccaggccaagaaatggcacccaggccagctgttgcttgaggaaatatttattcatcggaatgtgcttacgaaacagcacgcacagtacgacaatatctgcccaactacggtggttacaaataagcagataccagttcttcttacttaacccttccagcccgtgaacttcccattgaaggtgtgggttcagatgcagtaataccgccagaccttcacaccagcaatacatcataaaatcacaaaaacggctaacctttcgccaaatgactggcacaggtagcaatagttttacaatcccggcaatgatgatcgggacggaacaaaaaatagtgaccaaaatggtcaatacgatactcagcaaaagggttatcgcagcgagtattctcgtcataatgaatttattcaaaaggttagccatagacagtgcgctaaagaagcgcaaggcgcagattttagcagaaaacgacccaaataacggatgatccttaaggagaaaaataattcatatctatccacattagaaaaaatcccattatctcaattattagggatggatttatttttaactgcatgaaaaacaaagacaaacatcatgctgtaaaaagcatgataataaattaaaagcgatgtaaataatttatgcacaaagttatccacatgacgatttgcgagcgatccagaagatctacaaaagattttcacgaaaagcggtgaaaaactcatgttttcatcctgtctgtggcatcctttacccataatctgataaacaggcacggacattatggttcagatcccccaaaatccacttatccttgtagatggtagttcttatctttatcgcgcatatcacgcgtttcccccgctgactaacagcgcaggcgagccgaccggtgcgatgtatggtgtcctcaacatgctgcgcagtctgatcatgcaatataaaccgacgcatgcagcggtggtctttgacgccaagggaaaaacctttcgtgatgaactgtttgaacattacaaaagtcatcgcccgccaatgccggacgatctgcgtgcacaaatcgaacccttgcacgcgatggttaaagcgatgggactgccgctgctggcggtttctggcgtagaagcggacgacgttatcggtactctggcgcgcgaagccgaaaaagccgggcgtccggtgctgatcagcactggcgataaagatatggcgcagctggtgacgccaaatattacgcttatcaataccatgacgaataccatcctcggaccggaagaggtggtgaataagtacggcgtgccgccagaactgatcatcgatttcctggcgctgatgggtgactcctctgataacattcctggcgtaccgggcgtcggtgaaaaaaccgcgcaggcattgctgcaaggtcttggcggactggatacgctgtatgccgagccagaaaaaattgctgggttgagcttccgtggcgcgaaaacaatggcagcgaagctcgagcaaaacaaagaagttgcttatctcagttaccagctggcgacgattaaaaccgacgttgaactggagctgacctgtgaacaactggaagtgcagcaaccggcagcggaagagttgttggggctgttcaaaaagtatgagttcaaacgctggactgctgatgtcgaagcgggcaaatggttacaggccaaaggggcaaaaccagccgcgaagccacaggaaaccagtgttgcagacgaagcaccagaagtgacggcaacggtgatttcttatgacaactacgtcaccatccttgatgaagaaacactgaaagcgtggattgcgaagctggaaaaagcgccggtatttgcatttgataccgaaaccgacagccttgataacatctctgctaacctggtcgggctttcttttgctatcgagccaggcgtagcggcatatattccggttgctcatgattatcttgatgcgcccgatcaaatctctcgcgagcgtgcactcgagttgctaaaaccgctgctggaagatgaaaaggcgctgaaggtcgggcaaaacctgaaatacgatcgcggtattctggcgaactacggcattgaactgcgtgggattgcgtttgataccatgctggagtcctacattctcaatagcgttgccgggcgtcacgatatggacagcctcgcggaacgttggttgaagcacaaaaccatcacttttgaagagattgctggtaaaggcaaaaatcaactgacctttaaccagattgccctcgaagaagccggacgttacgccgccgaagatgcagatgtcaccttgcagttgcatctgaaaatgtggccggatctgcaaaaacacaaagggccgttgaacgtcttcgagaatatcgaaatgccgctggtgccggtgcttagtcgcattgaacgtaacggtgtgaagatcgatccgaaagtgctgcacaatcattctgaagagctcacccttcgtctggctgagctggaaaagaaagcgcatgaaattgcaggtgaggaatttaacctttcttccaccaagcagttacaaaccattctctttgaaaaacagggcattaaaccgctgaagaaaacgccgggtggcgcgccgagtacgagcgaagaggtactggaagaactggcgctggactatccgttgccaaaagtgattctggagtatcgtggtctggcgaagctgaaaagcacctacaccgacaagctgccgctgatgatcaacccgaaaaccgggcgtgtgcatacctcttatcaccaggcagtaactgcaacgggacgtttaagcagtaccgatcctaacctgcaaaacattccggtgcgtaacgaagaaggtcgtcgtatccgccaggcgtttattgcgccagaggattatgtgattgtcagtgcggactacagccagattgaactgcgcattatggcgcatcttagccgtgacaaaggcttgctgaccgcattcgcggaaggaaaagatatccaccgggcaacggcggcagaagtgtttggtttgccactggaaaccgtcaccagcgagcaacgccgtagcgcgaaagcgatcaactttggtctgatttatggcatgagtgctttcggtctggcgcggcaattgaacattccacgtaaagaagcgcagaagtacatggacctttacttcgaacgctaccctggcgtgctggagtatatggaacgcacccgtgctcaggcgaaagagcagggctacgttgaaacgctggacggacgccgtctgtatctgccggatatcaaatccagcaatggtgctcgtcgtgcagcggctgaacgtgcagccattaacgcgccaatgcagggaaccgccgccgacattatcaaacgggcgatgattgccgttgatgcgtggttacaggctgagcaaccgcgtgtacgtatgatcatgcaggtacacgatgaactggtatttgaagttcataaagatgatgttgatgccgtcgcgaagcagattcatcaactgatggaaaactgtacccgtctggatgtgccgttgctggtggaagtggggagtggcgaaaactgggatcaggcgcactaagattcgcctgaacatgccttttttcgtaagtaagcaacataagctgtcacgttttgtgatggctattagaaattcctatgcaacaactgaaaaaaaattacaaaaagtgctttctgaactgaacaaaaaagagtaaagttagtcgcgtagggtacagaggtaagatgttctatctttcagaccttttacttcacgtaatcggatttggctgaatattttagccgccccagtcagtaatgactggggcgttttttattgggcgaaagaaaagatccgtaatgcctgatgcgctatgtttatcaggccaacggtagaattgtaatctattgaatttacgggccggatacgccacatccggcacaagcattaaggcaagaaaattattcgccgtcctgcgtttcttctacaggctgcatctcgctaaaccaggtatccagtttctgccgcagcttgtccacgccttgtttcttcaagctagaaaacgtttcaacctgcacatcaccgttaaacgccagtacagcttcacgcaccatattcaattgcgctttacgtgcgccgcttgccagtttgtccgctttggtcagcagcaccagaacggcgatattgctgtctaccgcccactcaatcatctgctgatccaaatctttcagcggatggcgaatatccattagcaccaccagaccttgcaggctctgacgtttttcgaggtattcgccgagcgcacgctgccatttgcgcttcatctcttccgggacttccgcataaccgtacccaggcaagtcaaccagacgcttgccgtcagccacttcaaacaggttgataagctgggtgcgccctggggttttactggtacgagccaggcttttctggttagtcagcgtgttcagcgcgctggatttacctgcgttggaacggcctgcaaaagccacttcaattccggtatcggaaggtaggtggcgaatatcaggcgcactcatcacaaaatgcgtctgttgataattcaaattagtcaaagcggtcgtctccgtcagtcaaagctttgtggcgattatacctgaaccataataaaaggcggatttttcggcgtgagcgttgtaagtaaaagccatacgctttgtgagacattgccgatagtctttatgcgaaatagcagagaaaattctgcgatgcatgtcaaataagctatataaatcagtgaattgcttttatataaaactctgaaaatgtgcaaatactgatggcggttgattgtttgtttaaagcaaaggcgtaaagtagcacccatagagcgaggacgctaacaggaacaatgactcaggatgagggtcaggagcgccaggaggcgaagacagaggattgtcaggaagacaaacgtccggagacgtaattaaacggaaatggaatcaacacggattgttccggctaaaggaaaaacagggtgtgttggcggcctgcaaggattgtaagacccgttaagggttatgagtcaggaaaaaaggcgacagagtaatctgtcgccttttttctttgcttgctttctgttagattccgccgcaaatctatactgaataaaacggctaaaagacgaaccattatgaaaccaagttctagtaacagtcgcagcaaaggtcatgcaaaagcgcgtcgaaaaacacgcgaggagctggatcaggaagctcgtgatcgcaagcgtcagaaaaaacgtcgtggtcatgcgccgggcagccgcgcagcgggcggaaacaccacgagtggcagcaaaggccagaacgcaccaaaagatccacgtattggcagtaaaacccctattccattgggcgtgactgaaaaagtcaccaaacagcacaaaccgaagagtgagaaacctatgcttagtccgcaggcggagttggaattactggaaacggatgagcgtctggatgcgctgctggaacgtctggaagcaggcgaaaccctgagtgccgaagagcaatcctgggtggatgctaaactggatcgtattgatgagttgatgcagaaactcggcctctcttatgacgatgacgaagaagaggaagaagacgagaagcaagaagacatgatgcgtctgctgcggggcaactaacggattgccgccgtgggccttcccgttctgctgataacccttccggttatatgttatctggtgtggttattcgttaaactacagcggttgtcgcggcgacaaaagtggctgcgcaaccggctgatgacccgaaacgggcatccgccggtacgccgtagccgccagagacgccatcggaaggagtgagcatgtctgtacagcaaatcgactgggatctggccctgatccagaaatataactattccgggccacgatacaccagctacccgaccgcgctggagtttagtgaagacttcggcgaacaggcgtttttacaagccgtggcgcgctatcctgagcgtccattatctctctacgtacatatcccgttctgccataagctttgttacttctgcggttgcaataagattgttactcgccagcagcacaaggccgatcagtatctggacgcgctggagcaagaaatcgtccatcgtgcaccgctgttcgccgggcgtcacgtcagccaattgcactggggcggcggaacgccgacgtatctgaataaagcgcaaatcagccgcctgatgaagctgctgcgcgaaaacttccagttcaatgccgatgcggagattagcatcgaagtcgatccgcgggaaatcgaactggatgtactcgatcatttacgcgccgaaggctttaatcgcctgagcatgggcgtgcaggacttcaacaaagaagtgcaacgtctggttaaccgcgagcaggatgaagagttcatctttgcactgcttaaccatgcgcgtgagattggttttacctccaccaacatcgacctgatttacggcctgccgaaacagacgccggagagtttcgcctttaccctgaaacgtgtggcggagctgaaccccgatcgtctgagtgtctttaactacgcgcatctgccgaccatttttgctgctcagcgcaaaatcaaagatgctgacctgccgagtccgcagcaaaaactcgatatcctgcaggaaaccatcgccttcctgacgcaaagcggctatcagtttatcggtatggatcactttgcccgtccggatgacgagctggcggtggcccagcgtgaaggcgtgctgcatcgtaacttccagggctacaccactcagggcgataccgatctgctggggatgggcgtttccgccatcagcatgattggcgactgctacgcgcagaaccagaaagagttgaagcagtactatcagcaagtggatgaacaaggcaatgcgctgtggcgtggtattgcgctaacgcgtgatgactgtattcgccgcgatgtgattaagagcctcatctgcaacttccgtctggattacgcccctattgagaaacagtgggatttgcacttcgctgattactttgcggaagatctcaagctgctcgccccgttagcaaaagatgggctggtggatgtggatgagaagggaatacaggtgacggcgaaaggtcgcttgctgatccgcaacatttgcatgtgctttgatacctatctgcgccagaaagcgcggatgcagcagttctctcgggtgatttaaatagtgaatggcgcttcgtttacaaagtagaaaacgaaagcgccatcaatgtgctgagaacaagattgcctgatgcgctgggcaacaaaacctgttgaaattattgcttttgtaggccggataaggcgtttacgccgcatcaggcatctgagcatgatgcctgatgcggcgctggtcgcgtcttatcaggcctacgactttctccgcatccggcataaacaacgagcttcagctaaacagcccaatcattgcggcacacagcacggcagcaacggcagtttgcggtgtgtggctgtcaactgcgccactcgataccagattaattattgattccagcataatgactctccccgttttccgggcaagatcatactgaacttatcggaacagtaaagcgtaaaataccagcaatttgcgctcaataatcaatctttacacacaagctgtgaatcactccatccccagctcttttaacttacgcgtcagggtgttgcggccccagccgagtagccgcgccgcttcctgtttatgcccctgcgtatgtcgcaacgcggtcgtcagtaacgtccgctccagctctggctgcgcttcggaaagcagattttgatgaccggaacgcagcgctctgtctgcccactgcgcaagaagcgtcgcccagctgtccggttgcatttggctagtactctccgcaaccgtactttcaaacagttcgccgggcaaatcctgaatcaacacttcctgcccggcggccatcaccgttagccagcggcaggtgttttccagctggcgcacgttgcctggccacgccagacgcgtcagagcagcttcggtttccggatgcagtaacttcgcttctacgcccagttcgcgcgcggcaacctgtaaaaaatggcgcgccagacggggaatatcttcccgacgttcgcgcagcggcggcagatgaacgcggataacgttcaggcggtggaacagatcctcacggaacttaccttcctgcactcgctgttcgagattctggtgagtggcagcgataatccgcacatccactttcaccggcgcatagccgccaacgcggtaaaactgaccgtctgccagcacgcgcagcaaacgcgtctgcacatccagcggcatatcaccaatttcgtcgaggaataatgtaccgccatcggcctgttcaaaacgcccctgacgaatggtattcgcgccagtaaacgcgcctttctcgtggccaaacagttcactttcgatcaaatcttttgggatagctgccatattcagcgcgataaacggcgctttggcgcgcggactgtggcgatgcagggcatgagcgaccagttctttaccggtgccggattcgccgttaatcagcacgctaatagaagaacggctaagccgaccgataatacggaacacgtcctgcatggctggcgcttcgccgatgatatcggtcgttgggccgttaagctgaacattacgcggctgctgctgttcctggtaatgactgatagcgcgctcaaccagcgccactgcttcgtcgatatcaaacggtttgggcagataatcaaacgccccttgttgataggcgctgacggcagcatccagatcggaatgtgcggtcataatgatgaccggaagcattggatggcgctgtttaatctgcttgagcagcgccagcccgtccattcccggcatacggatatcactaagcagcacatccggcgttttgctcgccagcgcctccagcacttctgcgccgttctcaaacgtcgtacaggttaaacctgccccagcgagcgcacgttcaagcacccaacggatggaactatcgtcatcgactacccagactatccctcgttgcataaacgtcacctttatttcctgataggcaggtaaacgctgaactcggtatgccctggccaactggtaaattcaattttgccactatgctgatcaatcaaattacgagcgatggataagccaagcccggtgccaccttcgcggccgctgaccatcgggtaaaacagcgtatcctgcaaatgaggcggaatgcccggcccgttatcttccacatcaatccgcgccgccagccggtagcgctcgccgtgtaaggtcagttgaaacgcggtgcgggtacgcagaatgatttcaccgccttccggccccagcgcctgtagcgcattgcgcacaatattcagcaagacctgttcaatttgatccgggtcgtgcgccagttccggtaggctgggatcgtaatcacgaatcaaccgcacgttgtccggcagttccatgctcaccagcgttaccacgcgttcagccactttgtgaatactttcggtaacgcgcgtaccgggcagctgcggccccaacagacggtcgaccagatttcgcagccggtccgcctgttcgataatcactttggtatattcgagtagacttgggtcaggtaacgctttgctgagcagctgcgccgcgccacgtaaaccgccaagcggatttttaatctcatgtgccaggccgcgcactaaatcacgggcagcaacctgctgggcgtgctgtagctgttcctgacttaagcggcgctggttatccatcggagccatctccagcaggatcatgccgtccggcatacgctgggccgtcacagaaaggatatggctgcgcccgtcgatgaccagcgtcacttcgttatcggtaaaaccttgccccgcctccagactttcttgcatcagctcgatatttaaactgaagtagctcaacagttccggtaacggtgtaccaaacaatttgcgggagctttgggcgagcagttgttgcgcggcagggttggcgtaatggatcgccaggttgtcatcgattaacaaaatactgttaatcaggctgttgaggatctgcccagcatcgggctgcgtgcctgttgccataaagcagtctcctgaacaggttgcaccattttagtgcattatagctttttacggataaaaagcgcgaagcatcagagaattgacggagaaaaaagcccatgcagagatgggctacagatagctgacaaacttcacgttggagagcgactcacctgctccggcctaccacatcatcaccgtgtaggccggataagacgcatttgcgtcgcatccggcgtgatgtgcttgccaccgatcccaggcctgccagagacaggcgaaaagtttccacggcaactaaaacacttagacgctgtagtacagctcaaactctaccggatgcggagtcatacgcacgcggtcatcttcttcgcgacgcagagcgatgtacgcatcaattgcttcgtcagtgaacacgccaccggctttcaggaactcgcggtccagatccagttcgttcagtgcttcttccagagagcctgcaacctgtgggatctctttcgcttcttctggcggcaggtcatacaggtttttgtccatggcttcgcccggatggatcttgttcttgataccatcaagaccggccatcagcagggcagcaaagcacaggtacgggttagctgccggatccgggaaacgtacttcgatacgacgtgctttcggagaagaaaccaccggaatacggatagacgcagaacggttacgcgcagagtaagccagcattaccggtgcttcatagcccgggaccagacgcttataagagttggtggtcgggtttgccagggcgttaatcgctttagcgtgtttgattacgccgccaatgtagtacagcgcctgctcagacagacctgcgtatttgtcgcctgcgaacaggttaacgccgtttttagacagagacatgtggcagtgcataccggagccgttatcaccgaacatcggttttggcataaaggtcgcggttttaccgaagcggtgcgctacgttgtgcacaacatatttgtagatctgaatttcgtcagcttttttggtcatggtattgaagcgggtagccacttcgttctgaccagcagtcgctacttcgtggtgatgggcttcaaccaccagacccatctgttccatcaccagacacatttcagaacgaatatcctgagcgctgtctaccggtggaaccgggaagtaaccgcctttcactgccggacggtgacctttgttaccaccttcgtattgggtggaggagttccatgcgccttcgatatcgtcgatagcaacgtgggaaccggagatagaacttccgaaacggatgtcatcgaacaggaagaattcaggttctggcccgaacagtacggtgtcggcaatgccagtggaacgcaggtaatcttcggcgcgcttcgcaatggagcgcgggtcacggtcatagccttgcagggtgccaggttcaaggatgtcgcaacggataatcagggtggagtcggcgaagaacgggtcaatcactgcggtggatgcgtctggcatcagcaccatgtcggactcgttaatgcctttccagccgccaatgctggagccgtcaaacattttgccttcttcgaagaattcagcattcacctgatgagcagggatagtgacgtgctgttctttacctttagtatcggtgaagcgcaaatcaacaaacttcacttcgtgctcgttcagcatcgtcagtacgtgttcagcggacatactttaactctcctggattggtcatggtcgtcgtggtaacgaaatctgcaattattttggccgtgtcgccgtaaaaaagataaagcgaaatctgtgccaacttttaaattgcccctaaaaggcgttatcatgcgcaccatcgtgcaaaagggctgcaccacgatgtgaatgttgcaccaatatagtgcttcaatggaaacattaagcaccatgttggtgcaatgacctttggataaccctttttatgctccgtgaaagcgatcacaaagggactctgcaatacttgtttgcggaggatgtttgtgatcctgttttgtagtgcgattaatccgtgtacaataacgcgctatttctaatgcctgaggcaaagttgtgatcgaaaaattgcgtaatatcgccatcatcgcgcacgtagaccatggtaaaaccaccctggtagacaagctgctccaacaatccggtacgttcgactctcgtgccgaaacccaagagcgcgtgatggactccaacgatttggagaaagagcgtgggattaccatcctcgcgaaaaacaccgctatcaaatggaatgattaccgtatcaacatcgttgataccccggggcacgccgacttcggtggtgaagttgaacgtgtaatgtccatggtagacagtgtgctgctggtggttgacgcatttgacggcccgatgccgcaaacgcgcttcgtaaccaaaaaagcgtttgcttacggcctgaagccgattgttgttatcaacaaagttgaccgccctggcgcgcgtcctgattgggttgtggatcaggtattcgatctgttcgttaacctcgacgcgaccgacgagcagctggacttcccgatcgtttacgcttctgcgctgaacggtatcgcgggtctggaccacgaagatatggcggaagacatgaccccgctgtaccaggcgattgttgaccacgttcctgcgccggacgttgaccttgacggtccgttccagatgcagatttctcagctcgattacaacagctatgttggcgttatcggcattggccgcatcaagcgcggtaaagtgaagccgaaccagcaggtcactatcatcgatagcgaaggcaaaacccgcaacgcgaaagtcggtaaagtgctgggccacctcggtctggaacgtatcgaaaccgatctggcggaagctggcgatatcgttgcgatcacgggccttggcgaactgaacatttctgacaccgtttgcgacacgcaaaacgttgaagcgctgccggcactctccgttgatgagccgaccgtttctatgttcttctgcgttaacaccagcccgttctgcggtaaagaaggtaagttcgtaacgtctcgtcagatcctggatcgtctgaacaaagaactggtacacaacgttgcgctgcgcgtagaagaaaccgaagacgccgatgcgttccgcgtttctggtcgtggcgaactgcacctgtctgttctgatcgaaaacatgcgtcgtgaaggtttcgaactggcggtatcccgtccgaaagttatcttccgtgaaatcgacggtcgtaaacaagagccgtatgaaaacgtgactctggacgttgaagaacagcatcagggttctgtaatgcaggcgctgggcgaacgtaaaggcgacctgaaaaacatgaatccagacggtaaaggccgcgtacgtctcgactacgtgatcccaagccgtggtctgattggcttccgttctgagttcatgaccatgacttccggtactggtctgctgtactccaccttcagccactacgacgacgtacgtccgggtgaagtgggtcagcgtcagaacggcgtactgatctctaacggtcagggtaaagcggtcgcgttcgcgctgttcggtctgcaggatcgcggtaagctgttcctcggtcacggtgcagaagtttacgaaggtcagattatcggtattcatagccgctctaacgacctgactgtaaactgcctgaccggtaagaaactgaccaacatgcgtgcttccggtactgacgaagccgttgttctggttccgcctatccgcatgactctggaacaagctctggagttcatcgatgatgacgaactggtagaagtgactccgacctctatccgtattcgtaaacgtcacctgacggaaaacgatcgtcgccgcgccaaccgcgcaccgaaagacgattaatttcgttttttagtcataaaaaacctgccagcgatggcaggttttttttgcctgtcgtgagcgcacaccaatgcgagtatctcccttataagtctgtggttacgtcaatagagagctttgtcacaattatctgcaaagtcatacgccgttaattgctttcttttttggcgtaagcgtaagatgcttcatctggtttaaaccaaaaggattaaacaatggcggagaatcaatccaccgtagaaaatgcaaaagagaaactggatcggtggttgaaagatggcatcaccacgccgggtggaaaactccctagtgaaagagagctgggagaactgctgggcattaaacgtatgacgctgcgccaggcgttgttgaacctcgaggcagaatccaaaatcttccgtaaggatcgtaaggggtggttcgtgacccagccgcgatttaattacagtccggagctgagcgcgagctttcagcgggccgcaattgagcaagggcgagagccttcctgggggtttaccgagaaaaaccgtaccagcgatattcccgagacgctcgcgccactgattgcagtgacgccaagtactgaactctatcgcatcaccggctggggggcgctggaaggacataaagttttctatcacgaaacatatattaatcctgaagttgctccgggctttattgaacaacttgaaaaccacagtttttctgcagtctgggaaaagtgctaccaaaaagagacggtagtaaaaaaattgattttcaaacccgtcagaatgccgggcgatatcagcaagtatcttggcggttctgcgggtatgccagcgatcttaattgaaaagcatcgcgccgaccagcaaggcaatattgtccaaatagatattgaatattggcgatttgaggccgtagacctcatcattaatctgtaagtgttttatggtgacaataaataacgcaagaaagattctacaacgtgtcgacactcttcctctttatttacatgcttatgcctttcatttaaatatgcggctggaaagagtgttgcctgctgatttacttgatatcgcaagtgaaaataatctacgtggcgtcaaaatccatgttctcgatggcgagcgtttttctcttggtaatatggacgataaagaactctctgcctttggggataaagcccgccgtctgaaccttgatattcatattgaaaccagcgccagtgataaggcatctattgacgaagccgtcgccatcgcgttgaaaactggggcaagctccgtacgtttttatccacgttatgaaggtaatttgcgcgacgtattaagcattatcgctaacgacattgcctatgtacgggaaacgtatcaggacagcggcctgacttttacgatcgagcagcatgaagatttaaaaagtcatgagctggtgagcctggtcaaagaaagtgagatggaatctctttccttactgtttgattttgcgaacatgatcaatgcaaatgagcatcccatcgacgctttaaaaacgatggcaccgcatattacccaggtccatatcaaagatgccttgatcgttaaagaaccgggtggcctgggtcataaagcctgtattagtggtcagggtgatatgccgttcaaagcgttattaacgcaccttatctgcctgggtgatgatgagccgcaggtgacggcatatggcctggaagaagaggttgattactatgcgccggcgttccgctttgaagacgaagatgataatccgtggatcccttatcgccagatgagtgaaacaccattgccagaaaatcatttactggatgcgcggttacgtaaagaaaaagaagatgcaattaatcagataaatcatgtgcgtaacgtactacaacaaatcaaacaagaggcaaaccatcttctgaaccactaataagttttaactcatacgcagttaataaaaccattccatatgaatggtcggtatcttattgcctttaaaacagtgattttaaaaatcgcttaggggatgttatgctcacgaaaaagaaatgggcgttatttagtctattaacactgtgtggcggtacaatttataaattaccgagcctgaaagatgcgttttatatcccgatgcaggaatatttccatttgaccaatggtcaaattggtaatgctatgagcgtaaacagttttgtcaccacagtgggcttttttctgtctatttattttgccgataaactaccgcgcagatacaccatgagtttcagtctcattgcgacaggattactgggtgtttatttgacgacaatgccggggtattggggcatcctctttgtctgggcgctatttggcgttacttgcgacatgatgaactggccggtcttgctcaagagcgtaagtcgattgggcaatagcgaacaacaaggtcggttgtttggcttcttcgaaacagggcgtggcattgtcgataccgtggtggcattttctgcgttggcagtatttacctggtttggcagtggcttattaggttttaaagcaggcatctggttctattcccttattgtgattgccgtaggcattattattttctttgtcctgaatgacaaagaagaggcaccgtccgttgaggtgaaaaaagaagacggagcaagcaaaaacaccagtatgaccagcgtgctgaaagacaaaactatctggcttatcgcttttaacgtcttcttcgtttacgcggtttactgtggcctgacattcttcattccattcctgaaaaacatctatctattgcccgttgcgctggtgggggcttacggcatcattaaccaatactgtctgaaaatgattggtggaccgattggtggcatgattagtgataagatcctgaaaagcccaagtaaatatctatgctacacctttatcattagtaccgctgcgctcgtactgttgattatgctgccgcacgaaagtatgccggtctatttagggatggcatgtacgctgggctttggcgcgatagtctttacacagcgagccgtattttttgcacctatcggcgaagcaaaaattgctgaaaataaaacaggtgcggcgatggcgttgggtagctttattggttacgctccggcgatgttctgcttcagtctgtatggctacattctggatttaaatccggggattattggctacaaaatcgtgtttggcattatggcctgcttcgcattcagtggtgcggtggtttccgtaatgctggttaagcgtattagccaacgtaagaaagagatgctggcggctgaagcttaattaatggccggatgtgcttaatccggccaacgaaaaccgtatcaaccgtaggccggataaggcgtttacgccgcatccggcagtttcacatcagaagaaatacttcgtcccgatacggatctggttttgctcgcggtggtacggttcgacgttgcggtctaaccagcgcaattcgaaataagggagccagtgttcattaatacggtaacggaaggtgttagtgatttcccaatgatgatctttcccgttgctactattaaagtcattcactcgcatgaagtaatgtggctcaaatgtataggaaaatttatcggtgattttaaaattccagtaggtgccaatttcataggtgtcattattatccagttccccgctcaaatctgtactactatagttattatggttatagcgatttcgtactgtcagattaaaccatggtacaaatttatagttgacgtccagatacactgcaccaccgctaccgatactcttatcattaattaagccaccgggctggatggttaatttatcggttggtttaaataacggataccagccttcaatttcgttatatccatgttttagttcatcttctcgctgaaagttgtaggtattggttaacataatacccgcgcccatatcgaagttataacccacacgtagcataacctcgccctgatcggaggcaagattatatgcctccctgttttcgacgtatgcgccagcaaatacgctggcagaggtcagagaagataataaaattattgcattaatctttttcataataagtccattttttaaacgtagggaggccgccacccaccaggatggaaatagcggctattgacatttataacgttacggaagccgttttttcttctgtcgccatctctttatttttgcgttggttgatttcctcaataatcaatgcaaaccgtttttcattgagtgtgtaaaagaatcccatcgtcaatgcagcaataattgccagtgcacaaggccagataaaaatgagctgacgcaaaccctgtaatgtcgcatcgctttgcgcgatgttgggaacataaccaatttgcgtcagcataatgcctggcaagaagccagcaagtgcggcagaaattttacgaaagaaggtataaccggtataaacagaaccttcggcacgaataccggttttccattcaccgtaatctacggtatctggtaccagtgcccagttcaggctgtttacaaaggccgtgccaaaaaaggcgacacaagagaacatgacgaaagtgaaagagttacttccccagaaataattcagtatatcacccaccgcccacagcaccatgccagccagataaacctgttttttaccaaaacattttacagttaatggcaccagtaatacgccgatgaggatgcatcccatactgaagaatcccatccagctcaataaattaatatcattcagcacatactgggtgtaatagacctgaatcgccagtttgatattaaatgccgccagggtacacaagttagcaatgcataaaaccagcaatggcggattccgaaatatcgcgcaaaaacttttgagaatactggctttatgtccggttggcgttgtgtccacataatgctctttgacgcctctgtagcacagcatcataaaaataaagccgccaatggagaacataagtgccgcacaggcataaccgacggtactgtcagaaaaaaggctctgcaacggaataaacgccacggtacaaatcaatagccctatggttgcaccaccctggcggtaagccgcgagctgcgcgcgctcattcgggtttttggtaattgccgggatcatcgcaccatagctgcagttcatcagactgtaactaagtccaaacatcataaacagcgcggtggcaatcgtcgttttaaccggcaaacaaaaggtggtggcgataaactggagcgttgcaattaacgccgccggaaccgctgcatataaaataaagggacgaaatttgcctttaggcccaatatttttccggctgtcgagtaaaaatccggtgagcatatcggtaaacgcggtaaaaaacttcgccaccagaaagataatcccgccatagtaagcaggcatccctaattcatcggtataaaatttgaggagatacagagtaccgatgcagagcattaaattgctaccgacgtcgcccataccataggcgattttttcccgcagattcagttttaatgtcagtggattatggtcagacataatcactccttataacgccccgcagggcgtcgtttattattattacgccgtgcgtttacgggcttctatctcttccacaatgcggacatacatcttctcgttcaggctgtagaagcaacccatcgccacaatggtgactaccgccagtgcgcttgggtagatgaagatcaactggcgtaacccttcaatggtgtggtcagcctgtgcgacgttcggcacatagccaatttgcgtcagcatccagccggggaagaaaccagccagcgcctgagacactttgcgaaagaaggtaaaaccggtgtagaccgttccttcgctacgcacgccggtgcgccactcgccgtactcgacggtgtcggaaaccagcgcccagttcaggctgttaacaaacgcactgccaaagaacgccaggcaggagaacgccacgaagctgacgctaccgccgccgaagaaatagttgagcagatcgcccagcacccaaatcagcaggccgccgatataaactttcttcttgccaaaacgtctgacactggcaggcatcaggaatacgccgatgaaaatacagcccatgctgaaaaatcccatatagctcaacaggatgggatcgttaagcacgtactgggtgtaatagacctggatggcgagcttgacgttaaacgcccctaaagtgcagaggttggcaatgcacagaatgaacagcgggcggttacccgcaattgcgcggaaagattgcagcaggcccggcttttgcgccggattagcaggctgggtttcgacataacgctctttcacgccgctgtagcagatccacataaacagcaggccaaacagactaaacagcgtggcggcgaagatatagccaagttgctgattaccttcgataagattcataactggcacgaatcccaccgtgcacagcagcaggcccagcgtagcgccgccctgacgccatgccgccagactggcgcgttcgttggggtttttggtgatagcgggaaccattgcgccgtaggagcagttcatcatgctgaaaaacagtccgtaaagcataaacagaatagtggccatcaccgttttaccggtgacatcaaacggtgtgccgacaaagttggcgatcgccagtaaggtgaccgggaaactcgcatacagaataaaaggacggaacttaccttttggaccgatcttgcgtcgggaatccaacataatgccggtacccatatcggtaaacgcagtaaagaatttactaatcaaaaagataatgccgccataggtgcctggcagccccagaacgtcggtataaaacttcaaaagataaagcgtaccgatatccagcaggatgttagaggccaggtcgccaataccgtaagagagtttctctttaaagggcaggcgtaaagttgctggatcttccgttgtgatgtgactcatgcttgttctccctttgcccatgagtttccccacgggcggatgtgattagatgctttttaagctcgcgaacagtgccgcccattcgctatcggcgcgataaaagaccggcggcttgccgatgggcgcattaacggtaacttccccgccccggaacgcttcacccgtccaggcgtggacccagttatcctccggcagatagagcgtccagtcgctacggccttcttcatgcaccggagcgaccagaatgtcgcgacctaacaggtactgatatttcagggtgtaagtgtgcgcatcgtcttcgtaatgcaggaacagcgggcgcataaccggcaggccggacttcgcattcagcgcgacggcctctttcaggtaaggtttcagggtggtgaagacggtggtcatacgggcgaaatgggcgatggtttctgcgtcgccgtcaaactgccagttgtcgccaggacggttaccttcgtgggtgcgcatcatcggcgtgaaggcgctgaaatcgcaccagcgcagcagcagctctttgctgcgcttcatctcaaacagggtggtgtaaccgccaatgtcgctgtggtgcaggccatgtccggtcattgccaggctcagcgccgccgggacaacgctcgccaggccatcgtcgagactccagtcgacgttctggtcgcccgcccacatcatggtggagtatttctggctaccggtagaaccggcgcgcataaagaaaaggatctcgccgagcttgcccgtttcttcaagggcttcgtagttacacttcgcccacagcgcaggccaggcgttatgcataatttcggcactgacgccgttatgcaagtacgtgtcggtgggcagatactcgccgaagtcagccatccagccgccgcagccgagttcaatcatgttctttttgatcacttccttgaaccaggcgtaggcttctggattagtgagatcgacaacgccgccgtaaaactcgccaaactccaccagatagtcaccgccagaggcatcttttgccagatagccgtgttgtgccgcttcttcgcagagatctttatcgctggcaacatacgggttgatataggccaggaactgcacgccctcctgattccactgcttaatgcgactatccagttgcgggtagttttcgctgttccacttccagttccacatcacgcgtttgccaaaagaggtcatacgaataccggaccagtcctgcgcccagatgccgttgaccttcacgcccgcgttacgcatggtgtccagtttcttctggcacacttccgtcccgccctgaatgccgagcgttactccgtcataaatccagtcgggcagttctggctggcgtcccagcagggcggttaatttttccagcagggaaatgtatgtgtcagcacattcaaaacgcagcgttgctttgtcttcccacagcgccagttcatggtattccggggcactaaagtcgaagttcatatagcaactgttatcaacatggcagtaatacttctgcgtgctgacaaacgtaggctgtgggaagaaagtccagtaatagtcgccgcccgcattttctttgcagtcggcctgccaggtgacataggtttgtttgttgcgaccaacgccttgttcactggtccatagcgggaacggtttgccacgcagatcgaagtaggaaaactgttcgccgcagccgtagatatggtcctctggttgagcggcaaggcgcagccagatacggttgtggttaaggttgtcgttttgtagttccagcaataaacgcccctgatcgtcggcagagatattcagcgtggcgctaatgtcagaaccacggctgaaatgaattaaccaaccatccggactctggctgacgatggcgtcggtaagcgcaattttctcctgtagtttatctttaatgctgaaattaccgcggaacatatcgatatccgctataccactgccaatccataaacaaggattatctttgctatgggttaaaataagacgttgttgaaaatgtagggtaaaactgtcgttattctgatgaaattgaaaatctaataactgtggacgtggcgtatccataactaatctccatagagttgagaacgagattgttgccttcctgttattacaggcttatgtaaaatgattctcataaaactgatatataaaaactttacagaagctgagctgtttttaacttaataaattgaagatacataatgttgcctttagcgagtgaaatgttcttcaatgattttgactgctaatcaatacaagttattttctctgtccgtaaatattaaaaaacaggcggtgcggttttccactttccagtaataataagtcgataccactattaaaggcgttaggcgggcaactcataggttcaactgccagtccctgacgctgtaatttttcaccgctataaacctgcacccagagttgatcggaacaaaggcttacgctaagcgcctgctgtggatgggtaatggtcatttcccacaaatcattagcggttttaaaggtgtggtcgatttttgtcgcggctatttttttcgcctgcgtgaaatttaaatccagctcatcaacgtggtgaagcgttgtcggattcgcgtgctcatcgacggcataaacctggtttgccggaagctggaacagatattcatcaacagatgttaagttgcaggttaaataaggatgaatacccacgccataaggcgctgcgacagtgccgatattctggcttgcgatctcaacggaaagacccgtgtgtgcgttgaggctataaacaacttgactagccagcataaacggatagccgtaactgggcggcagaaaagctgtcagggtaacgctggtggcggttaattcactaatttgccagtctcgccaggcaagcagcccgtgaatagcggctttactactatgttcattaatgggtaactgatattcctgcccctgatagcggtaacagccgttggcgatccggttcggccacggaataagcactttacccagatgcgccagcggcatctcttcgggtttgtgcgggatgactaaatgacaaccctgaaaggttaattcagccagaccagcaccgacggtcacaatggtcgcgtgataatcccccgcggcaagactaacggtctgtccactgcaatgcatattggtgatttgcatacaaggcaccttaattaagctcatacagcctcccgtgaggctgatgtcaaacccaaaaactgcaccggacggtcccctcgcccctttggggagagggttagggagaggggaaaacccgcaccctattttcagatcagttatttcgcattaatatccagcagacccgctgcaaccgctggagccatgccgggcgctaacgggatacgcgggatcaccaggcaatgcagcaggtgataaatatcctgtttgccgtcccagactttggtggtgaccttattgtccgcatccagctcctgccaccaggaaccattttcatagtccatcaggtacttaatgcagtactcccaccatgtttgataccaggtttcatactggcgatcgccagtgacggtgtagagcgcgtaggccgtacccattgcttcgacgataggccaacgtacacgttcgcggaccaccggttttccttcccagtcaacggtataaacaatcccgtccgcgccatcgggtgcccaggcatcgcgcacggtggcgttaaacagacctttggcatcttctagcagccatgctggtggttgttcgcaacgggcttccagggcagcatggatgtgcagcattaaacggccccattcgatccagtggcctggtgtacctccgaacgcgcggaagcgatgcgccgggttatctttgttgtaatccggcagcggattccactgggtatcgaagtgttcgttaacgcgataatgattatttctggcgacgtcgtggataatcacggaagccacgcgaatcgcgcgatccagccattttttgtcgtgagtgacgtcataaacaatcaagaaagcttccaccgcgtgcatattggcattgccgccgcggtactcttcggttttgctgaaggcttcgtcccaggattccaggcacatctgctcttcttcgctccagaaatatttctcgataatttcaatggtgtaatcgagcagcttgcgcgcttccgggtgacccgttgtgacggcgctggcggcacccagcagagcaaagaagtgttgatagccctgtttggaggcatccaccacgccctcgtcattcacgcaggcataccagccgccatattttttatcacgcagtgcgccgttcatggctttgataccgtgatcaaccaagctgtaagcgccaggtcgacccatcgccgcagcaacggaataaacgtgcaacatacgagcggtgatccacagatgggtgcccatctcttctttgatttgccctttattgcctaaccagccaaaaccagtcggcactacggaatttttaccaaaatcaaagatgcggtcggtttcctgttccagccaacggttgtggcttagggtgttaaaccatttcattccttttatcctcatcttagcggcgtttagccatcatttcgtcgacgatatcgccaagttgttgtaatttcggtgcgcaaacgtcacgcagcatcagctcgttgtctggtaaaccgacgacgcttgcccagactgcacggcctgccaggaatccgcttgcgcccgccgtcattgccacgcgtacggcacgcgggaacagtttttcgtcgacaccggaagagaggatcacccatggcatattgatatggtcattcagacgttgactagcacagagaagctcttgttgcggacctttgccataaagcggcatttcaactttgtagaggtcagcgccactgtcgcccagctctttggcggcatcgatgatcgcttgttcgcgatcgaatttatcgccacgacgcggtgggcggacgactggctcaatgatgcttaccagaccgtgactgtggcacagttcgttgaactctttcaccatatccagacgttgctgcgcatcttcatcactacgccacagcaccagcagttttaaggctttgccaccgtcttgtttgatctgtagcggattgattttgcggtcaataaccacgctatcgaccggaataccgttgccaggaatgaactcatcggcggcgacaatcatggcgcaacttttggcaatcgcgttttgctcaaccacctggcggtagcagaattgttgatctaccagaatcgcgctggcataagggctgagggcctttgcagcgttaactttgaaatcagttaaaacgctatcggctaccggagcgggtgccccagccgcggcaaacatcatgcgcatggcttcgcgctgatcgaccgccagcatggcaaaaccgccgcttgcgcgcgtaatgtcgttgatggtgtacttattcattcatttattcctttatccagtcgttacatttttactttggcagtcatcccggcactgacacggacctgttccagaatggcggaccagtcctggcgaccgcgacccgctgcgcgcgcctggctataaacctcccgactggcggcccccagcggcattggcacatgcagctggttggcgacatcaagggcgatgccaagatccttatgggcaagatcgatcatgaaggcgggagaaagatctccgctgaggactttgtttggccaggaagtggtgaagtgacctttaccggcggcggtaccgctcatcactttgacggcaacatcgaagggaagattcagggcttcgcacaaaacggcggcttctgcgctaagcgcattgagcgcgatgctcatgtagttgttgatgagcttaacgcggatccccatgcccggaccgccagcgttgatcaactcactgcccatcgccatcaggatcggtgtggcacgttcaacttgttcagcggtgccgccagccagcagtaacagagtaccggtaatggcatttgcagaagtacggcctaccggaacatccatcatgctgaagcctttggcttgcatatcggcaatcaatttatcggtttgcagcggatggatggtggacatatcaatgaccagcgcatcggtagataagccttcgcaaacgccgttttcaccgaacaacacgttgcgcaccagatcgccattcggcaacatggtaatgataaattcggcatctttagcggcctgcgccgggttggcggcgggagtcgcacctttgtctaccagatgccgcacagcttcggcgttcacatcaaagacgcgaagttgatgcccttgctgcaataaattgctcgccattgggctacccatttgtcctaaaccgataaacgcgattgctgccataaccctctcctgaatacagttatgtcactttttgtcatttatgacatgctttgcttgtctgtttttgatcgtatttgtaatttatcgtcaaaaaattgacagccgtcactttttaaacaattggtgaaattaaaatgaacgcatcccaaaatgtttaaggaatgaccatgattcgtgttgcttgtgtaggtataaccgtgatggatcgcatctattacgtggaagggttaccgacggagagcggtaaatacgtggcgagaaattatacggaagttggtggcgggccagcggcgacggcagcggttgcggcggcaaggctgggggcgcaggtcgattttattggtcgcgtaggtgatgacgacacgggcaacagcctgctggcagagctggaatcctggggcgttaacacccgttacaccaaacggtataaccaggcgaaatctagccaatccgccatcatggtggataccaaaggcgagcggataatcattaactaccccagcccggatctgctgcctgacgcagagtggttggaggaaattgatttctctcagtgggatgttgtgctggcagatgtacgctggcacgacggcgctaaaaaagccttcaccctggcccgtcaggcgggtgtgatgaccgttctggacggggacattacgccgcaggatatcagtgagctggtggcattaagcgatcacgcggcctttagtgaaccgggtctggcgcgcttaacgggcgtgaaagagatggccagtgcgctaaaacaggcacaaacgctcacaaatggtcatgtctatgtgacccagggtagcgcaggctgcgactggctggaaaatggtgggcgtcagcatcaaccggccttcaaagttgatgtggtagataccacaggtgcgggtgatgtttttcacggcgctttggcggtggcgctggcaacaagtggggatttagcggagagtgtccgcttcgccagcggtgtagcggcgttaaaatgcacacgtcccggtggacgagccgggatccctgactgtgatcaaacccgatcttttttgagtctttttgtataaaatgccagggtgatggtttttcgaggaattttcatgagccttaccgaactaaccggtaacccgcggcacgaccaactcctcatgctgatcgccgagcgtgggtatatgaatattgatgagctggcaaatctgctggatgtctccacgcagacggtccgccgggatattcgtaaattaagcgagcaaggcctgattacgcgccatcacggtggcgcgggtcgggcttccagcgtcgttaatacggcgttcgagcagcgtgaggttagccaaaccgaggaaaaaaagcgattgccgaagcggtggcagactatattcctgatggtagtacaatatttatcaccattggtacgactgttgagcatgttgcccgggcgttacttaaccataatcatttgcggataatcaccaacagcctgcgtgtggcgcatattctttaccacaacccgcgctttgaagtgatggtgcccggcggtacgttgcgctctcataatagcgggatcattggccctagtgcggcgtcctttgtggctgattttcgtgctgattatctggtaacaagcgttggggcgattgagagcgatggcgcgttgatggagtttgatgtaaacgaagctaacgtggtgaaaacgatgatggcgcacgcgagaaatattctgctggtcgccgatcacactaagtatcatgctagcgcggcggttgaaattggtaacgtggcacaggtcactgcgctctttaccgacgagctgccgcccgctgcgctaaaaagtcgcttacaagacagccaaattgaaatcattcttccccaggaagacgcgtaaatttttgtgaccgttaacctggcttcataccttgccacatagccaaacccatcctttcccgctacagttaatttcttgtggcgcgaaaggaggcaaaaatgctctatatctttgatttaggtaatgtgattgtcgatatcgactttaaccgtgtgctgggagcctggagcgatttaacgcgtattccgctggcaagccttaagaagagttttcatatgggggaggcgtttcatcagcatgagcgtggggaaattagcgacgaagcgttcgcagaggcgctgtgtcatgagatggctctaccgctaagctacgagcagttctctcacggctggcaggcggtgtttgttgcgctgcgcccggaagtgatcgccatcatgcataaactgcgtgagcaggggcatcgcgtggtggtgctttccaataccaaccgcctgcataccaccttctggccggaagaatacccggaaattcgtgatgctgctgaccatatctatctgagccaagatctggggatgcgcaaacctgaagcacgaatttaccagcatgttttgcaggcggaaggttttagtcccagcgatacggtctttttcgacgataacgccgataatatagaaggagccaatcagctgggcattaccagtattctggtgaaagataaaaccaccatcccggactatttcgcgaaggtgttatgctaaaaaccattcaggacaaagccaggcaccgtacccgtccactatgggcctggctaaaactactctggcaacgcattgatgaggacaacatgacaaccctggcaggtaaccttgcctatgtgagcttgctcagtttagtgccgctggttgccgttgtttttgcgcttttcgccgcttttcccatgttttccgacgtcagcattcagttacgtcactttatttttgccaactttctgcctgctactggcgatgttattcagcggtatatcgaacaatttgttgccaattccaacaagatgaccgccgttggggcgtgcgggctgatcgtcaccgcgttattgttgatgtactccatcgatagcgcgttgaataccatctggcgcagtaaacgagcgcgaccaaaaatttacagcttcgccgtgtactggatgattttaacgctggggccgctgctggcaggggccagtctggcgatcagttcctatttgctctccctgcgctgggcgagcgatctcaatactgtcatcgacaacgtgctgcgtatttttccgttgctgttgagctggatctccttctggttgctgtacagcattgttcctaccatccgcgtacctaaccgcgacgcgattgtcggcgcgtttgtcgccgcactcctgttcgaagcaggaaagaaaggtttcgcgctttatatcaccatgttcccgagttatcagctcatttatggtgtgctggcggtgatccccattctctttgtttgggtctactggacatggtgtatcgtcttgcttggcgcggaaattactgtcactctcggggaataccgcaaactaaaacaagcagctgaacaagaagaagacgacgaaccatgattgcattaattcaacgcgtaacccgtgccagcgtcaccgtggagggagaagtgacgggcgaaattggcgcgggacttttggtgttattgggtgtcgaaaaggatgacgacgaacagaaagcaaaccgtctgtgcgagcgtgtgctcggctaccgcatctttagcgatgccgaaggcaagatgaatctcaacgtgcaacaggcgggcggcagtgtgctggtggtttcccagtttaccctcgccgcagataccgaacgggggatgcgcccaagtttctccaaaggtgcaagtccggatcgcgcagaggcgttatatgactatttcgtcgaacgctgccgtcagcaagagatgaacacgcaaacaggacgcttcgctgcggatatgcaggtaagcctggtcaatgatggccccgtgacattctggttgcaggtatgagccagcttccagggttgagtcgggaaacaagagagagtatcgctatgtatcaccttcgggttccacaaacagaagaagaattagagcgttactatcagtttcgctgggaaatgttgcgtaagcccctgcatcaaccaaaaggtagcgaacgcgacgcgtgggatgcgatggcgcatcaccagatggtcgtcgacgagcagggtaatctggtggcggtaggccgactgtatattaatgccgacaatgaagcgtccattcgctttatggccgttcatcccgacgtgcaggacaaagggttaggcacgctgatggcgatgaccctggagagcgtggcgcgtcaggaaggcgttaagcgcgtgacctgtagcgcccgtgaagacgcggtggagtttttcgccaagctggggtttgttaatcagggagaaatcaccacgccaaccaccacgccgattcgccattttttgatgattaagcccgtcgccactctggatgacattctgcatcgcggcgactggtgcgcgcagctgcaacaggcgtggtacgaacatatcccgcttagtgaaaaaatgggcgtgcgcattcagcaatataccgggcaaaaatttatcactaccatgccagaaaccggcaatcagaatccgcaccatacgctgtttgccgggagtttattcagtctggcgacgctcactggttggggacttatctggctgatgctgcgtgaacgccacctcggcggaacgattattcttgcggatgcgcatatccgctacagcaagccgattagcggtaaacctcatgcggtagccgacctcggtgccttaagcggcgatctcgaccgtctggcgcgcggacgaaaagcacgggtgcagatgcaggtcgaaatctttggcgacgagacgccgggtgcagtgtttgaaggcacgtatatcgttctgcccgcgaagccatttggcccgtatgaagagggcgggaacgaagaagagtaactgatggagaggggcggtgctgcctctctcattcaggtcatttatattagtccttggctatttcggttatattaaataagaactctataaatttttattcttcgttggctccatacgtgtcttgctacatcactgttcaggagcatttaaatattatttgtagaactgagtggcaattatcgcagataatgcttaattcatcatcttagttcatgtttgagcgatttttgatagtcaaaaccccctctggtgccatacttttctcataaatatttttaaaatctatagctaacaaatattatgcaaagataatggactagcatcattgtcagtatcattcatttactgctctgtatgttatgaataattatgttgtatgtttgctcttaaaccgtgggaaggaggctataatggttgccaatattaatctcattaaacaagaaagttattctgttgttaatttagaaaaacaactttcccgaactgttaccaacaaaattataacgatgagcaagtaaagaccggttggtggcagtactgaccggtctgtgatgaaagattaatttcaccttaaatcctggtgctgttaggatgctgacgtttttcggctacaccattcagattatgcaaataaatatctctgaatataatatattcatagcacccataattcatcctgggcgataactaaaccatttttgagtaataaatgaaacaactgcaacactcttattatttctggaaaacgcctcgcaaaaacaaaacaacatgcaaaaatccgctttttttaaatgattttccggcgtaattttcgcacatacattaatgagtaatatatgtaaggtattggtaatggcgatgaatacggtttttcttcatttaagtgaagaggcaattaaacggctgaacaagcttcggggctggcgtaaggttagtcgatctgcaattttacgcgaagcggtagagcaatatctggaacgtcagcaattcccggtgcgtaaagcaaagggaggcaggcaaaagggggaggtagttggtgttgatgatcagtgtaaggagcataaggaatgacaaaaatttttcattcttgaatataaaaaacagatgcccttattctggtattaatacaaggctgttttacttgaacttataataactgcaactgttacatcatatctggaaaacgcctcgcaaaaataaaaaatgatgcgtaaatgagctttctttaaagattcggcaagggtacttttctctccatagattcaaaaatgatattggcgagatatttatgaactctctggcaggtatagatatgggcagaattttactcgatttaagcaatgaggtgattaagcaacttgatgatctcgaggtgcagcgtaatcttcctcgtgcggacctattaagggaagcggtagatcaatacctgataaatcaaagccaaacagcaagaaccagtgttcctggcatctggcaagggtgtgaggaagatggtgtcgaatatcagcgtaagctgcgcgaggaatggtaatgggaaaaaatgatgtcaatcagattgctgacaacgtgcgcgttgttcatgccggatgcggcgtgaacgccttatccggcctacaaagtcgtataaattcaatgtattgcagtttattggtaggcctgataagcgcagcgcatcaggcaatcttacgcttgtcatcagtctcatgcccataaccttattgatgtggtggtgggtaaattgaggccaaaccggcactggcggcatagcttgaggtggtaacgcggaatacgagagatggtgtcgtcacaccctatgagctgtaatccgggcgacctgcgccacccggaaaacgtcagagattactctccttcacccggaaacaggaacgggttgatggaactgcgggcatagccttcttgctccattcgtgcgtccagtaccagagaggcgaggtcatctgctacggcttcgatttttggatctttttcctgatagagaattttcaggtaagtgtcgcagtcatcgcagctttcggctttaatcgcggcctgttcgtcatccaggctccagtaatgcagtttgccgctctgctcgcagttgctgcattttacgcgcactacgtgccattcagtttcacacaggttgcagtgcaggtaacgtagcccctgagtggtgccaatttgcaccatgctggacaccggcatagaaccacaaaccgggcaatattgacgttgctcgccgtattcagcgcgggctttgccggggatcagattggccatctgcgcccagtagaggctcagtgcagcccagataaacggcgctttatcgctgctgacggagctgaaatcagaggcaaacagcgcgctggccatatcttccagctcctgagtgcttgccttctccagattctcaatcactgccagcgccgggccgctcatttcaggtttcagctcagcaatcagcgccatcagcagcttttgccagtgcttatcacgcggcagaacgtgaatatccagcgggggcttgccttgtgcgctggcttctttaatgcgcgcagtcagatccatctccagcggatggtcgtacagcaccacttcctgggcgtgggcgataagcgcagcaaagcgcaggtaatcacccagaggattattttctgccagctcgcgcagacgctcggcgcggcggttgtataaattcttgagccgagggaacaataacggcggaatcatatccgccgtacgtttctcgctactacccagctcatcttgcgggattatgcgaatactcattcagctttcttttccgttgtcttgcggacctcacggtaccagcgcgggtgatgtttcttcgcccaggcgctggtaacccatccttccaccatggcggtaatcgtgcctttcacccaaagggcggcgtagatatgcaccatgataaccacaattaacgccactgcggcaaaactatgcagcattaacgcgaatcggatcaccgggatactgaaagcaggcgcaaaataaggacgccagataatcacgccgctcaccagcagcagaaccaggaaaataatcgccgcccagaaaacgcatttctgaccgaagttataacgcccggtgtcacctacttcctcgttgacgacgatcttacgaatattcttcgcccaaaagatatcatcccgattgattaggttgtgatgccagtaacggaaaaacatgatgatgaagctggcaaacataaccacgccgacaaacgggtgcagaattcgcgccagctgcggtgtgcccatgatttgcatcaaccagttgaaggacgggaacaaaaagcccagcccgctcaccgccgccaggatgaagcagaaggcggtgatccagtggttgatacgttccggcgcggtgtagcgcacgatggtgtcacgtcgtttcatttgcgctcctcgtctttctcttcgtgcagattattctcttcctcatccgcacggttcggaccgacacccacgtagtggaagatactggccgcaaaggtagccgcaaagccaacagccgcgagcggtttccagatgcctttccagaatttcacggtttcgctgatttccgggttctccggcaagccatgatacagatttggcttgtcagcatggtgcagcacgtacatgacgtgtgtaccaccgacgcctgccggatcgtacagacccgcattgtcgtaaccgcgggttttcagctcagcaacgcgctcgctcgccagcgttttcatgctctctttcgtaccgaagtgaatcgcgcccgttgggcaggtcttcacgcaggctggttcttgcccaaccaccacgcggtcaacgcacagcgtacatttgtagacgcggttgtcttccgggttgaggcgcggaatgtcgaacggacagcccgcaatgcaataaccgcagccaatgcactgctcggactggaagtcgacgataccgttggcatactgaataattgcaccttccgccgggcacgctttcaggcagcctggatcggaacagtgcatacagccgtctttgcggatcagccattccagtttgtcgttctgctccacttcgctgaagcgcattaccgtccagcttttggcgcttaaatcattggggttgtcgtacaccccaatgttattgccgacggtatcgcgaatgtcgttccactcactacacgccacctgacaggctttacagccgatacaggtggtaacgtcgatgagtttcgccacttcttcctggaagtcccgcgcctgaggcgcgggggtcagaccgttagtcgcggaacgacgaatgatatcttgagattgataagccatatgtcgtctccgttacaccttttccacattcacaaggaaggacttaaactccggcgtctgcgtgttcgcatcaccaacgaatggcgttaaagtattggcaataaagccttttttagctacgccttcatagccccagtgaatcggaataccgatggtatcgatatctttgccgttcgctttcagcgtgcgaatacgtttggtcaccaccgctttggctttgatatagccacggttggaggagactttcacggtatcgccctgggcaatgccaagtttattcgccaggctctccccgatttccacaaactgctctggctgcaaaatcgcgttcaacagcgcgtgtttggtccagtagtggaagtgctcggtcagacgataggtggttccgacatacgggaacttatcggctttacccaatgcttcggcgtcgtctttaaagatacgtgcagccgggttgctgataacgtttggatgcagcgggttagttcccagcggcgtttcaaacggctcgtagtgttccgggaacggaccttccgccatcttatcgagggcaaacagacgccccatgccttcctgctgcatgataaacggcccgacgccgctacccggaggcgctgcgctgtagtccggaatatcccagccggtccacttagtgccgtcccatttcagcaactgacgcttcggatcccacgggttaccctgcggatctgcggaggcgcggttatacagaatgcggcggttaagcggccatgcccatgcccagcccagcgtgttaccgaggccagacggatcggcgttatcacggcgtgccatctggttgccttccggcgtccagctaccggcgaaaatccagcagccacaggaggttgtaccgtcatcgcgcaattgggcgaagctactaagttgttggcctttcttgacgataaccgcaccggttgccggatcggtaatatcggccagcgccttaccgttgctctccatcgccacttcttcactagatggctcatgcggaatggcgtagttccatgtcatgttcagcacctggtccgggttcgcgccaccctgttcggcatacatcttgcgcaagcgcaggaagataccggagaggatctcgccgtcagtcagcgcaatccccggggcgtccgcacctttccagtgccactgtaaccagcgaccactgttaacgatagaaccgttctcttccgcgaagcaggtgcttggcagacggaacacttcggtctggatcttgctgctgtcaacttcgttcagctcaccgtggttctgccagaagttagaggtttcagtgttcagtgggtcgatggtgacgaggaacttcagtttgctcagacaaccgatcactttgtttttgttcgggaaactggcaacagggttaaagccctggcagatatagccattgaccttgccctctttcatcatctcgaagtattgcaggacgtcgtagcctttatcccacttcggcaaccagtcaaagccccagctattttccgccgtcgctttatcaccaaagaaggccttcatcatagagacgaagaatttcgggtagttgccccagtagtttacctggccttccagcagcggttttggcgtgttggcggtaaggtaggtttgcagatcggtctgcttctcgcttggcagcgtcatgtaacctggcaggctctggctcagcagccccaggtccgtcagcccctgaatattggagtgaccgcgcagggcgttaacgccgccgcctgccatccccatattgccgagcagcagctggatcatcgccatcgtacgaatgttttgcgcaccaacggagtgttgcgtccagccgagggcatacaggaagctggcagttttatcgtgagcactggtttctgcgatgtattcgcagactttcaggaacgcgtcttttggcgtaccacagatgttttcaaccacatctggcgtgtagcgggaaacgtgctgtttcagcaagttccacacgcagcgcggatgttgcagcgtggtatcgcgtttggcgaagccgttttcgtccagttcataagtccaggaggatttatcgtacttgcgtttttccgcgtcgtagccggtgaacaggccatcttcaaagccgtaatcctcacgcacgatcaggctggcgttggtataggcttcggtgtattcgcggttgaatttttcattgttcagcaggtacagcaatacgccactcaggaaagcaatgtcagtaccggaacgaataggggcatagtagtcagctaccgccgccgtacgcgtaaagcgaggatcgatcacaatcagcttcgcgccgttgtgaattttggcttccatcgcccagcggaacccgaccgggtgagcttcagcggcgttaccgcccatcaccacgacgaggttggcgttcttgatgtcgacccagtggttggtcatcgcaccgcgaccaaatgttggagcaagacttgctaccgttggtccgtgtcagacacgcgcctggttgtcgaccgcgagcatacccagcgcgcgggagaatttttgcgttaaatagccggtttcgttactgctcgcggaagcacacagcatcccggtggagagccagcggttaacagtcacgccttcggcgttttgcgcaatgtagttagcatcgcggtcttctttcatcagtttggcgatgcgatcaaacgcctcttcccaactgatttgctgccatttatcagaacctggcgcacggtattccggaaacttcagacggctttcggagtggatgaaatccaccaggccagcgcctttcggacaaagtgcaccgcggttgaccgggtgatccggatcgccttcgatatggaagatagatgctttggcgttttttgctccgtcaccgaggctgtacatcaacagcccacagcctacggaacaataggtgcaggtattacgggtttcgcgggtgcgcagcagtttatactgccgggtttccgcgagtgctacgctgggtgcaaaacccagtgccgctgccgtggtgcctgccataccgccagcgcagatcttaaagaactgccttctgctgacctgcatggattgctccttgtttcgacattgtcacgtcccatttacattcgcttgctgcgtgtgcagggagtgggagttatttttctttgcggaaggggccgcaaaggtccagaattggctcaatttccctccatccaggaagggtttgtaacagaataccataatgttggtgtgtgtgttcttatctggttaagagaaagtgaaaaaaacacagcgaaaagaaatcgaaaatgtgacaaatatcacaggtgttcgtcaaattgagttatggcggcgtgatgatttacaacacccacggttagatgaggtcgcggaagaagttcccgttgcgctggtctacaacggcattagccatgtggtgatgatggcgagccccaaagaccttgagtactttgcgctcggttttagcctttccgaggggattatcgaaagtccgcgcgatatcttcggcatggatgtcgttccttcctgtaatggtcttgaagtacaaattgagctttccagccgccgctttatggggttgaaggagcgccgccgggcgctggcgggacgtacgggctgtggcgtatgcggcgtggagcaacttaatgacatcggaaaaccggtgcagccgctaccgttcacccagacgtttgatctcaacaaactggatgatgcattacgtcatctcaacgattttcagccagtggggcaactgactggttgtactcacgccgctgcctggatgttgccatctggcgaactggtcggcgggcatgaagacgtgggtcgccatgtggcgctggacaaactgttaggccgccggagtcaagaaggggaaagctggcagcaaggtgcggtactggtttccagtcgtgccagttatgaaatggtgcaaaagagcgcgatgtgcggcgtagagattttgtttgcggtgtctgccgcgaccacgcttgctgtagaagtggctgagcgctgtaatctgacactggtaggtttttgtaaaccgggtcgggcaacggtttatacccatccgcagcgtttgagcaattaattaaaataagtcctgcgaaatatattaaattgcaggacttattcatttcgtgaattttattattttatttataaacaaaatgcgtgtagtggcgttttcttttttcatttattatgttcactctcttatctatatatttataaggcaattaaatgaaaaggaatttattatcttccgctattatagtcgccatcatgtccctcggtctgacgggttgtgatgataaaaaagccgaaacagaaacgctcccgcctgccaatagtcaacctgccgcaccagctcctgaagcgaaacctactgaagctcccgttgcaaaagcagaagctaaacctgaaacacctgcgcaaccggtggtcgatgaacaagcggttttcgacgaaaaaatggatgtctatatcaagtgctacaacaagttacagatcccggtacagcgcagtctggcgcgttatgctgactggctgaaagattttaaacaggggcctaccggtgaagagcgtactgtttatggcatctacggcattagtgaatccaacctcgctgagtgtgaaaaaggcgtaaaaagtgctgtggcgttaacgcctgcgctgcaaccaattgatggcgtggcggtgagttatatcgatgctgccgtggcgttgggtaataccattaacgaaatggataaatattacacccaggaaaattataaagacgatgcgtttgcgaaagggaaaacgctgcaccagacattcttaaaaaatctggaagcctttgaacctgtagccgaatcttatcatgcggcgattcaggaaattaatgataagcgtcagcttgcggaactgaaaaatattgaagaaagagaagggaaaacattccactactactctctggcagtcatgattagtgcgaaacaaattaataacctgataagccaagataagtttgatgcagaagcggcaatgaagaaagtgtctgaactggaaacgctagtggcgcaggccaaagaagcggataaaggcggcatgaatttcagctttattaatagcgcaggccagtatcaactcgaggctaaaaaatacgttcgccgcatcagagataaagtcccgtactctgactgggataaagagcaacttcaggacgcaaacagtagctggatggtcgaagactctttcccgagagcattacgcgagtacaacgaaatggttgatgactataatagcctgcgttaaacgtttttgatgataaatgcagtgtcggatgcggcgcatccgacacagttcaccccttgtgaagtaactccataaatgcctcatatcctgttaacccggcaataatctccgccggatgctgacacaatatgcttgccagatagctaaatatttttagctcatgacgcgcatcggcggcggcgcaggcgatcaagacatggttaatgacttcgttattcacctcaactggttgggcgagggtaataaaaaatccacgaaaacgtcgctcctgttcgctccagcaatgtgggatggcgaggcgattaacaatcaggttttcaccttcgccttcgcgggcgatgatgcgttgtgcttcatcggcggtaatatggtgttgtgcgactaattgcgcacaaatttgccgggtaatatgttgccagctttcaccgcgtacattgctataatgaaaacttccgggggcagagaaaaaacgctccggctgttggcgaataaatgccgtcgccagaaaatgttttatttgttcgataccggcagccgtaatgatattttttacggtgatgtaattatttaccgcgtcatccagtaaataatggctgttgttaatgatcaataacggctcaatctcttcgcgaatggcaacaagttcgcttaagctacgggcaataattacccgacaatttaaaacatcgcgctcaatggcgagctgattaatagtggcaatcgcgttctggtcgctgagcaaaatgatcggctggcgttcgttttgatgccgctccagcgcacaggcaaaatacaaaccgatcagatcgctgtcgaaaaggggaatatcgagctgttcacgcagtagcgtaataaagtgcagactcatatcaaaggccgcaggccaggcggctttcaggttattcatgctgctctggcggtgctcagcaatccacactggtgcggcaaggcaacgtaataaatgcccggtaatattctcaaccagctgcgcatcaataatattcaaactcgcgatgcccggcaccctttgcagcaacccctgcacattatcggcactaattacctgcgcttgctgatgctgtttctctatcaaacccgtcagggttcttacagcgttatcaccaagaaacagaccgctatgttcaacgatttgttttatctcgtcaccgggatattgcggccactcatcggtcagttgattacgcagggcgtaaatcgccagaatcaggctggagagataatcaccctgcatgagcggccagcggtgttggttgtcgcaggccgtggataaatgctgaaggttgtctcgtgttatgcccgccagcggaattaaaaacggatctttgcgcagcaagttcgccagcaagataacgcgtttctcttctgtctcatcaatgaaatggcccaaaccagggcggctggccaggcaacaagtgcgttcataacgctgttttaaccggggcagacgctctgctacccacgtttctggcaaattaagcgcgctggcgagttgcgcacggggagtgaaagtattcagtaataacagcgccagcagccgatcgtcgttatcgtgcttttgcagcaactgaaaaaagctgcggcgctcgaagatttccagctgatagcccgcactgccactggcgaaaatgcgggctttgccgttaagggtgaagttgagatagtcaatatcacgcaggatggtcctgccactaacgccagtctgttgcgccagctcgccaggcgtgcgcggctgttgctccagcagatcgacaatctttaactggcgttcgtttagcattaatccacctgacggaactggctaaacgcgttgactttctccgcagttaaggtcgtcagaaaaccccgtatcagcgtgagcagagcttcgtaatcggctttactaatcataccgctgttggcgtgcagataacgagttggcagacacagcgcgacaaccggacgcccgccgcccatcacgttgtagcgcccgccatccgtcgcaccggttttcatggtggaaaattgcagcggtaaatcgttatgtgcggcacagctttttaacgctgctaccagtttctggttggggaagtagcgcttgtcaaacagcatcagccccggcccctggcccagtttcagcgggtatttaatgttatcaatgcccggaacatcgcccgctacggcggtatccaacacgatcacgacgtccggtttaatgtgttccgcgctggtttgcgccccgcgtagcccaacttcttcttccacactgccaacgccatacagcgtaatttcgggattattcaccgtctgcaatagttcagccatcattgcgcagccgatgcggttatccaacgccttgccgaccactttatcttcgccccagcaggcaaaattggcttccgggctaataaaattaccaatttccacgccgcgcttttccacctcttcgcgactgttcgcgccaatatcaatgaacatctcatcaaaactcagcggttgttgcttttgcttttccgttaacgcatgaggcgcgacggaaccaatcacaccagggattttcactcccttgtgtgtgcgtatggttacccggtggttgagcatgctctgattccaccagccgccaatggtggtaaaacgcagaaaaccgctctcgtcgatgtgggtgaccataaagccgacttcatccatatgtccgacaacggcaacttttggacctttattccccttacgggcaacaaagctgcccagaccatcgaaggtgatttcattcacgcaaggttccagcgtgtttatcagaatgtcgcgaacttcctgttcatcgccgctgacggcgctggcttcgcacaactgttgcagtaactcaatgttcatggacaagctcctgttgcgcggctttcgctttgcggcgtaaccacaatcctttcaggacgataatgaaactaatgttcagcgcgaggccaatcgccagcaccagataaaagctacccaccgggctcatcaggccgatcagcgggtcaaagatacccaaaccaggtgccagacgtttgattccgaaagcgatcaccagcacgccggtaatgccgcccgccagcgtattggcggtaatcatcggcaacggagctgccagagcgtaaggaatagccggttcggttgcgactgtggcaccgaccacaatggcactactggcagcctctttttcctgtcgggtaaacagtttgggcgcaatgaacgtcgcaagacccgccgcgacgggcggcatcagcgcgacaacgccgacgatggcgtaccagtcataaatgtgtttttccagcagactgaagcagaagaaccaggcggttttattgatggggccgcccatatcgaacgccagcatcgcaccgaccagaaacgctgccgcaaacttcatacttggaggaatggtattcaggaagtggagcagcccgcccatgaggtcggacatcaccggcccgataacgtagtaagtgagcacgccgaaaaccagcagagtaacgaacgggatcagcatactaccgagcagcggttgtaatgctttgccaaggcgcactttgcggaaccagaagacgaaatagccaatcgccagccccagcaccaccgcgccgaggaatcccgcaccgctctgggtgccgagcagcgctttgtcgttcgccagatagcaaaccagaaacgccggagcgaaagccggtttatcggcaatgctgctggcaatataagcgcccatgatggggatcataaaggtgaagccaaggtaaccgatggattcaactacccaggtaaagctcggcgcgcctttgctcatatcggtatacggcaaaccgaactgcaccagcatgttggcaagcgccaccaggataccaccgccgatgacaaacggcagcgccgcagagacgcccgccatcaggtggctcatcacgctaccgctttgcacttcctgtttgccaagcttcacgccgctatctgcggcaaaaagctggctgtttgtcggtaattcgctgaaaatctggtcgatatttttcaacgcctgggagatggcaatctcataaactttcttcccggcaaaccgcgcgcgatcatcaccgctcaggccacgcccggtagcgagaatgacgtaatcggcagcggcaatctcttcgctggataagcggttttcaacgccactggacccttgagtttccacttttatggtatgaccgagagaacgggctttctgttccagggcttccgccaccatgtaggtgtgagcgatcccggcggggcagttggtgatcgcgacaatacgtaaggaactctccatcgccacttccttaactgctgagggtttgatttaacaaggcaagcacctggtcggtatcgccctgttgcagttgatgaataaattccttgtgaataattttgcgacacagtgtgccgatgattttgacctgatcctcttcgccgctttgcggcacgccgaggcagatccagcaattgacgtcttcgccatcgctggctttccagtcaatagcctgcgctttgcgggcgaataatacgaacggttgtttaacgcaggcgcttttaccgtgcggcacggcgacaccggaaccaaatccagtagagtgcattttttcgcgcagcagcagggtttgcaggaactggtgactgtcggtgataaaaccgttttgtaacgctattgtcgccaactgcttcagaacggaataagcgccattgccctgaatattcaggtcaatacagcttgcagtaagagctgccattaatcggactccataaaatatattttaatcaattgtaatggtggagcgattaagtgatgagaggcgatatgtcggtaaacaatgacaatttgagacagagtgaaaggtcagatttgcggagtaatgcacataatggttatttaaataaaccacatgaatcattaatgggttattcattatttttgtgatttactcacaatgtatcagggaaatataacttaccgggagatgtaatatgtttaatttttcaaatcgaaatttaaaatattgtgccggaggcatctctggcacattgggcaattacggcaggtaaaacacttcttgcagctcgctactcaccgggctgttatccgggttagcgggcataacatcggtcatatatttccaccaacgttggcagacatcagtgctggcaaccgcattccagcgttcttcagattcaatctctaccatggcaaacagcagattacgcgctttgtcgagatagatggcgtagttatgcgcaccgtgagatttcagcactgcttccagttctggccagatgggattatgccgacgctgatactcttcgtgggcgtcggggtttacctgcatgacaaaggctttgcggatcatgtttgctccttacagcgccagcgcactggcgagtggcgtaacgccgaaacgcttgccgagcgctatcaactcttcacggctgatggtctgtttcatgccgcccatgctataaaccttcactaatacttgtgcacttttttctgcggtgtcgattaaaccgaaggtttcatccagcgtcggtccgctgccgaagacgccgtggaagggccacaacaccaggctatgtttttgcatctcttgtgcggtcgcctggccgatttcgtccgtgccgggcaccatccacggcaaaatgccaacgccatccgggaataccaccagacactcggtgctgccttcccacagttggcgagtgaagaccgcggtgtcgttttcaagtacataggtgagggcgatcaggttggtggcgtggcagtgcatgatcacccgatctttgccgttggtggctttaatgcgctcgcagtgggaaaggaagtgagccggaagttcggaagtggggacggcttcgttggttaacccccaaagaatgtggtagcccgcgccgtcgctgtcgacttttacgatgcctaagttagccgcaggatcaagctggacgttacggaagaatttgccgctgccggtgacaataaacggtgtatttgccagtaaaggcatgggctggctgagcgggatatagcgcggttgttggtggaaattgtcgtgatatggtgcgatatcggcgtcatccaggcgtagcgtcaggttgccgccgttgcgctcatcccagcctttcagccaggcgtcggtggtggctttgatcattccctggacaaaccaggactgagtaatgttttgcatgttctgtgttcctgtaaattcggtgttgtcggatgcacgacccgtaggccggataaggcgctcgcgccgcatccggcaatcaatgcctgatgcgacgctgtcgcgtcttatcaggcctacaactattgccgacctgtaggcctgataaggcacttgtgccgcatccggcaatcaatgcctgatgcgacgctgtcgcgtcttatcaggcctacaactgttgccgacctgtaggccggataaggcacttgtgccgcatccggcaatcaatgcctgatgcgacgctgtcgcgtcttatcaggcctacaactattgccgacctgtaggccggataaggcacttgtgccgcatccggcaatcaatgcctgatgcgacgctgtcgcgtcttatcaggcctacaactgttgccgacccgtaggccggataaggcgctcgcgccgcatccggcagtgtttacccgcggcgactcaaaatttctttctcataagcccgcacgctctccagccattcgctacctgctggcgtatcgtgacgttggcaatacatttcccagaccgcctgccacggcaagcttttctgctcttccagcagtgccagacgcgcagtgtaatcgcccgccgcttccagcttgcgcagctcagcggtaggttccagcaacgcacgcagcagggcttttttcatattgcgtgtaccaatgacccacgcggcaatgcggttgatagaggcatcgaagaagtcaaggccgatatgcacccggtcaaacagatcgtgacgcacaatctcactggcaattgcctgggtttcatcatccagcagcactacgtgatcgctgtcccagcgaaccggacggctgacgtgcagcagcaactgcggcacatacagcatggcggcggaaatcttgtcggaaatcacttcagtcgggtggaagtgcccggcgtccaggcacagcgcagtctggcggctggtggcataccccatgtaaaactcattggagccaaccgtgtagctctctgcgccaatgccaaacaatttgctctcaacggcgtcgatatggtgcgcagggtttagcttctcgctgatcacctcatccagtgctgccagcagacgctgacgcggggcgagacggtcaacggtgatatctttcataccatccgggatccagatgttcatcacgcttggtgtgccgagttgctcgccaaaataggcgctaacgcgacggctggctttgcagtgatcaatccagaactggcgaatgctgtcgtcggcatgggaaagcgtaaagccatcggcgcttagcggatggctaaagcaggaggggttaaaatccagaccgagctgattggctttcgcccattcaacccagtttttgaagtgctctggtttgatctggtcgcggctgactggcgtatcactttccagatagatggcatgtaaattaagccgtttcggccccggaatcagccgcatagcctgttccagatcggcacgtagctcactggcattacgcgctttgcccggataattgcctgtggcctgaatccccccggtcaggctaccttccgggttttcaaaaccggaaacatcatcgccctgccagcagtgcatactaacgggtaaacgatcaagttggcgcagcgcctcctcgacatcaatccccaccgccgcgaaacgctgtttcgctagctcccaggcctgttccagttgagtggtcatgcgcaaagctcctttgtctgtcgtgtagagtgaatctgcgccacatagtgggcaatttcactgtcaggattaggggtaaaggtggtcagattcgcggtggtgctgacgacctgacggaaatcatccacattgttgagttcatccagcgtcattaactggatgccgatattgccgagcgtgctggcttcaacaggcccggcgatcacccgaataccgcaggcatcggcgcatagctggttgagcagcgtgttctggcagcctccgccgacaatatgcagttggctgaaatcttcaccgcgcagctgcgccagctcatgcaacacatcggcatacagcagcgccagactgtcgaaaatgcagcgcgccagttcagcatcactttccgggatcggttgcgccgtttcccgacacgcagcctgaatttcgctgcacatcgtctcaggattaataaagcgatcgtcattgggattgataatgaagcggcaagccggaagtgcctgtgtcgcggagataagcgccggaagatcgttgatttgctgctcctgaagcactcgctgaagcagccataagcccataatatttttcagcacccgatagcgaccttccgccccgccttcattggtgatgttggctgccagtgccgtgtcattggtaaatggcgtctggctttcgaagcccatcaaactccaggtgccagaagagagataagcagcacgactgccgtttaacgggctggcgataaccgcgctggcggtatcatggctggcaacggcgaccactggaatctcattaccctgcgggcaaatccagtgacctatgacattacccggatgcgtcgggcgaccaaaccaggctttgttggccccgctccacgccagtaggctctcgtcccagtcgtcgctattgatattgaccagttgcgtggtcgtggcgttggtatattcccagttcatcttgccggtcaggcgataactgaagtaatccggcatcagcagagcgtgagcaatgtgtggaataagttcaggttgttgctccgtcagcgcacgcaactgataaagcgtattgaagggcagaaactggatgccgctacgttgataaatatcgcgtttgccgagttgttgttgtgcctgcgccattaggccattggtgcggctatcgcgataagcaacgggcaggcccacacgctgaccctgttggtcgagcagcacaaagtccacgccccaggtatcaatcccaatgctatcgatacgaatcccttcctcgcacaccttgtttaatccaaggcgaatggcactttcaaggctatccacatcccaggtgacatagccgttctgactatgcagcccattgttaaaacgatggatttcgcgcagcgtcaggctgcggcattcacgctcgtaacgcgccagcatcacgcgcccactggatgcgccgagatcgacggcgacacaattgcgaaaggtcataatgtgatcctgctgaatttcattacgaccagtctaaaaagcgcctgaattcgcgaccttctcgttactgacaggaaaatgggccattggcaaccagggaaagatgaacgtgatgatgttcacaatttgctgaattgtggtgatgtgatgctcaccgcatttcctgaaaattcacgctgtatcttgaaaaatcgacgttttttacgtggttttccgtcgaaaatttaaggtaagaacctgacctcgtgattactatttcgccgtgttgacgacatcaggaggccagtatgaccgtattacatagtgtggatttttttccgtctggtaacgcgtccgtggcgatagaaccccggctcccgcaggcggattttcctgaacatcatcatgattttcatgaaattgtgattgtcgaacatggcacgggtattcatgtgtttaatgggcagccctataccatcaccggtggcacggtctgtttcgtacgcgatcatgatcggcatctgtatgaacataccgataatctgtgtctgaccaatgtgctgtatcgcagcccggatcgatttcagtttctcgccgggctgaatcagttgctgccacaagagctggatgggcagtatccgtctcactggcgcgttaaccacagcgtattgcagcaggtgcgacagctggttgcacagatggaacagcaggaaggggaaaatgatttacccagcaccgccagtcgcgagatcttgtttatgcaattactgctcttgctgcgtaaaagcagtttgcaggagaacctggaaaacagcgcaagtcgtctcaacttgcttctggcctggctggaggaccattttgccgatgaggtgaattgggatgccgtggcggatcaattttctcttagtctgcgtacgctacatcggcagcttaagcagcaaacgggactgacgcctcagcgatacctgaaccgcctgcgactgatgaaagcccgacatctgctacgccacagcgaggccagcgttactgacatcgcctatcgctgtggattcagcgacagtaaccactttagcacgctttttcgccgagagtttaactggagtccgcgtgatattcgccagggacgggatggctttctgcaataacgcgaatcttctcaacgtatttgtacgccatattgcgaataatcaacttcgttctctggccgaggtagccacggtggcgcatcagttaaaacttctcaaagatgatttttttgccagcgaccagcaggcagtcgctgtggctgaccgttatccgcaagatgtctttgctgaacatacacatgatttttgtgagctggtgattgtctggcgcggtaatggcctgcatgtactcaacgatcgcccttatcgcattacccgtggcgatctcttttacattcatgctgacgataaacactcctacgcttccgttaacgatctggttttgcagaatattatttattgcccggagcgtctgaagctgaatcttgactggcagggggcgattccgggatttaacgccagcgcagggcaaccacactggcgcttaggtagcatggggatggcgcaggcgcggcaggttatcggtcagcttgagcatgaaagtagtcagcatgtgccgtttgctaacgaaatggctgagttgctgttcgggcagttggtgatgttgctgaatcgccatcgttacaccagtgatagcttgccgccaacatccagcgaaacgttgctggataagctgattacccggctggcggctagcctgaaaagtccctttgcgctggataaattttgtgatgaggcaagctgcagtgagcgcgttttgcgtcagcaatttcgccagcagactggaatgaccatcaatcaatatctgcgacaggtcagagtgtgtcatgcgcaatatcttctccagcatagccgcctgttaatcagtgatattagcaccgaatgtggctttgaagatagtaactattttagcgtggtgtttacccgggaaaccgggatgacgcccagccagtggcgtcatctcaatagccagaaagattaattcgccatgccgatgccgacgatgttagcggcgacaataatcaccacacaaccgaggctcaacaccgttaccggacggcgtcctgcattgttccactctttcagcaccagcccgacgataccgccgcacaatacatagaaactcatatgcagcatccaactgatgtagtcatactgcgccggaatgcgggcgtggccccaggcatagaaaaagaattgcagataccacatcaacccgcccagtgtgctgagtaacacattgtgaatgatcaggctttttgccaggctgaagtcggcttttaggctcaaatccttcacttttgccagacgaataaaacagaaaccgaggttaatgatcgcgccgccgcccatgatgacaacatagcttggcagagcgacatacagtggatcgacgccaagtgcggcagcggcttcatgcatcggttttgcggcgttcatcgcaaaggacatcccggcagagaaaatgccgcacatcaccgccagcaccagcccttttttcagattgaactcttcggctttaatgcccatcttgcgctctttcaactgcccggcgcgagttacaatccctacgccaatcagcgccaccagaacgccgagcaacgtcatgcgtccgccttcggtgctaatcaacacatcgaaattgccgttgataattggcgtcatcagcgtaccgacaatcaacgtaatgccaatggcgatgccaattcccatgctcatgccgagataacgcatggtcaggccgtagttgatattaccgatcccccacatagcgccgaacagaaaaacaggcagtcgcgtagagagactaaagctgctgtaatacgcccagaaattcggtagtaacagggcgctgatggcccacggcagaataatccagctaacaatcccaccgacactccacatggtttcccaactccatttttttacttttttgaacggagcgtaaaaacaggctgcactggccgcgccgatcaaatgccaaaatatccccatcgtaatcgcgttactcatcttcttatcctcatcatttttcgtcgcgtcacatctccgacgagatgagtgtaaaaatcgtgctgtcgattaacctttcgcctgttgccgccgttgtcgatttactggcaatcacggcattaagtgggtgatttgcttcacatctcgggcattttcctgcaaaaccatacccttacgaaaagtacggcattgataatcattttcaatatcatttaattaactataatgaaccaactgcttacgcggcattaacaatcggccgcccgacaatactggagatgaatatgagctataccctgccatccctgccgtatgcttacgatgccctggaaccgcacttcgataagcagaccatggaaatccaccacaccaaacaccatcagacctacgtaaacaacgccaacgcggcgctggaaagcctgccagaatttgccaacctgccggttgaagagctgatcaccaaactggaccagctgccagcagacaagaaaaccgtactgcgcaacaacgctggcggtcacgctaaccacagcctgttctggaaaggtctgaaaaaaggcaccaccctgcagggtgacctgaaagcggctatcgaacgtgacttcggctccgttgataacttcaaagcagaatttgaaaaagcggcagcttcccgctttggttccggctgggcatggctggtgctgaaaggcgataaactggcggtggtttctactgctaaccaggattctccgctgatgggtgaagctatttctggcgcttccggcttcccgattatgggcctggatgtgtgggaacatgcttactacctgaaattccagaaccgccgtccggactacattaaagagttctggaacgtggtgaactgggacgaagcagcggcacgttttgcggcgaaaaaataatcatttgccgcctgctgcaatgaggcgtataggccgcatatcagcttaaaaaatgaaccatcgccaacggcggtggtttttttgtgatcaatttcaaaataaaaacaatgatccgataaaaataaaacagcgtttcaattgatgtggttttgatcacttttattgattaaatgaatgtctatcttcgtttccatcaacactgatgctccattgaggaattacgcatcagcccttaaaaatatgccgacaggtgatggaaatgcagataaaacgcagcattgagaaaatcccgggggggatgatgctcgtcccgctattccttggcgcactgtgccacaccttcagcccgggggcggggaaatattttggaagtttcaccaacgggatgattaccggtacggtgcccattctggcggtgtggtttttttgcatgggggcgagtataaaattaagcgcgacgggaacggtactgcgtaaatccggtacgctggtggtaactaaaattgccgtcgcgtgggtggttgcggcaattgccagccgtattattccggaacatggtgttgaagttggattctttgccggacttagtacgctggcgctggtggcggcgatggatatgaccaatggcggactttacgcttccatcatgcagcagtacggcacaaaagaagaagctggggcatttgtgttgatgagcttggagtccgggccgctcatgacgatgattattctgggcactgccgggattgccagctttgaaccgcatgttttcgtcggcgcagtattaccgttcctggtgggctttgccctggggaaccttgaccctgaattgcgagaatttttcagcaaagcggtgcaaacgctgattccattctttgccttcgcgctgggcaataccattgatttgactgtgattgcccagactggtttgctggggatcctgttgggtgtggcagtaattatcgtgaccggtattccgttgattatcgccgataaattgattggcggtggcgatggcactgccggaattgccgcttccagttccgcaggggccgcggtagcgacacctgtgctgattgcagaaatggtgcctgcgtttaaaccgatggctccggcagcaactagcctggtagcgacggcggtcattgtgactagcattctggtgccaattcttacctctatctggagtcgtaaagtcaaagccagagcagcgaaaatcgaaattttaggtacggtgaaataaacctgcttccttaatccccacagccggatgaactaacgttcgtccggtttgctattgagttcctgcctggatacttaccgcgaaaacagcacgcctgacataaaataaatatggtctaatggggaaatttctcgtggagagggaacagatgcgatatccggttgatgtatacacaggcaagattcaggcttatcccgaaggcaaacccagcgcaattgctaaaatccaggttgatggtgagttgatgctgacggagctggggctggaaggtgacgagcaggcggagaaaaaggttcacggcgggccagacagagcgctgtgtcattatcctcgtgagcattatctctactgggcgcgggaatttccggaacaggcggagttgtttgttgcgcctgcgtttggtgaaaacctcagtaccgacggcctgacggaaagtaatgtttatatgggcgatattttccgctggggagaggcattaattcaggtcagccagccgcgcagcccttgctataaactcaattaccattttgatatcagcgatatagcgcagttgatgcaaaacacaggtaaggtggggtggttgtatagcgtgatagcgccagggaaagtgtctgcggacgcgccgctggagttggtttcccgtgtcagcgatgtgaccgtgcaggaggctgccgccatcgcatggcatatgccgtttgatgacgatcaatatcaccgtttactctccgctgccgggttaagcaaaagctggacgcggacgatgcaaaagcgccgactgagcggcaagatcgaagatttttcccgccggttgtggggaaaataacccccggagtgtaggcctgataagacgctatcagcgtcgcatcaggcatcctgctcaaatgccggatgcggcgtaaacgccttatcctgcctgcaaatgcgaagtttaactccgcttatacagcggcaaccaaatcaccagccgtaaaccgcccagcgggctgtcttctgccttcacccagccacgatgctgctgaatggcggtttcaacaatcgccagccccaaacctgtaccgccagattcacgatcgcgtgcttcatcggtacgatagaacggacggaaaatctgttcgcgatcttccgggctaacgccaggaccatcgtcgtccaccgtaatggtgataccgtctttatctaccgcaaagcccacttcaatcttcgtatgggaataacgcagagcattacgaacaatgttttccagcgcactttccagggcgttcggattgccgtacagcggccacggcccaggcgggaagttaactgtcaagctcttgcccatttgctcggcttcgaacgccgcgttatccagcacttcactccacaactggttggctttgatggtttcgctaaccagcgcgtttttttgctgattacgactcatcaccaacagatcgttgatcatgctgtccagacgttgcgcttcggtttcaatacgctccagttccttgctttcaccgctacgacggcgcagtaacgccgtacccagttgcagacgcgtcagcggggtgcgcagctcgtgagagatatcagaaagcagacgctgctgagaggtcatcatgcgctccagcgcggtgaccatctggttaaaactggcacctgcggcaaggaattcctgtggccccgcttccagttccgggtgctggcgtaagtttccctgggcaacttcatcggcagcgtttttcagcttacgcgccggttttgccagactccaggccaaccacaacagcagcggcgtactgaccaacatggtgacaatcagcagtaatagcgggcggtcaaacagtaagttaatgaaatcggattgagaactgctggccggacgaatcagataaagttggtaattatcttcgccatcacgcacggagaacggaccgaccagttccacgcggccatactttttcttctgcggatgatcggcgttatcggcctgaccaataaagttacgaatgatctgcatttcgctgcgttcagcgccgatcacgcggccttcggtggtcaccaataacaaacgctgtcctggcggtgcccacttatcaatcgcccggaacagacgccgccaccacattaaatcgttgggcggatcgttcgccagctccgcttcgacatgctgctcaatcatcagcccctgacgctgttcgctatccagaagctcggtcatctggcgactatcgagcttgggtaacatcaaaaccaacatcaacaccagcgccagcgtcagccagaagatggcgaagatgcgcgcggttaagctgcctatcatgaagcagaaaccatcagatattagctcaactagcagaaaccatcagatagccgcgaccacgcaaggttttaaaccacgggtgaccatctttacgatccggcagtttacgacgcaggttggaaatgtgcatatcaatagcgcggtcgaaaggcgtcaggcgtttgcccaacacttcctggcttaaatgttcacgggaaaccacctgacccagatgctgtgccagcaaatagagcagggtaaactcagtaccggttaactccagcgtttgcccgtcgaagctggcttcctgacggcctggattcagcactaaggcatcaacttccagtgtcggactaccgttgtcgttgttttgctgttgctcgctccagtggctacggcgcaggatcgcgcgaatacgtgccaccagctcacgatcattaaacggtttcgggagatagtcatctgcgcccagctcaaggccgagaacgcgatcaagttcactgccgcgcgccgtcaacataatgacaggcgtctggtgtgtctggcgaagtgcttttaatgtgtcgataccatttttcttcggcatcattacgtcaagcaaaagtaaatcaatgctgtcgtccagaagatcaagcgcctgttccccatcgtgggcaacaatcacgttgaagccttccatctcgagcagctcctttaatagggaagtcagctctcggtcatcatcaactaacaggattttattcattgtttaaatacctccgaggcagaaattacgtcatcagacgtcgctaatccatgactttacgttgttttacaccccctgacgcatgtttgcagcctgaatcgtaaactctctatcgttgaatcgcgacagaaagattttgggagcaaatgatgcgcatagttaccgctgccgtcatggccagtacgctggcagtcagtagtttaagccacgctgctgaagtcggtagtggcgataactggcatccgggtgaagaacttacgcagcgcagtacgcagagccatatgttcgacggcataagtttaaccgaacatcagcgtcagcagatgcgagatcttatgcaacaggcccggcacgaacagcctcctgttaatgttagcgaactggagacaatgcatcgccttgtcaccgcagaaaattttgatgaaaacgctgtgcgcgcacaggcagaaaaaatggcgaatgagcaaattgctcgtcaggttgagatggcaaaagtccgcaaccaaatgtatcgcctgttaacgccggagcagcaagcggttttaaacgagaaacatcaacaacgaatggagcagttgcgtgacgtgacgcaatggcaaaaaagtagtagcttgaagctattgagtagtagcaacagtcgttcccagtaataaaccctgttttccttgccatagacaccatccctgtcttcccccacatgctgtgggggttttttttatcctcaatttgcctgctgcttaatgcattgcagatgatttgcttccgttatactagcgtcagttgatagcgggagtatttatgaatcaatcttatggacggctggtcagtcgggcggcgattgctgcgacggcgatggctagcctgctattgctgattaaaatttttgcatggtggtataccgggagcgtgagtattctcgccgcgctggtggatagcctggtggatatcggcgcgagcttgacgaatttattggtggtgcgatattccctgcaacctgccgacgataatcacagctttggtcacggtaaagctgagtccctcgcggcgctggcgcaaagtatgtttatctccggtagcgcactattcctgtttttgacgggtattcaacatctgatatctccaacaccgatgacagatccaggcgtcggggttatcgtgacaattgtggcgctaatttgtacgattatccttgtcagctttcagcgttgggtggtgcggcggacgcaaagccaggcggtgcgggctgatatgctacattaccagtctgatgttatgatgaacggcgcaattctgctggcgctggggttgtcctggtacggctggcatcgcgccgatgctctgtttgcattgggaatcggcatctatattttatatagcgcgttacgcatgggatatgaggcggtacagagtttactggatcgcgcattgcctgatgaggaacggcaagaaattattgatatcgtgacttcctggccgggtgttagcggcgctcacgatcttcgcacgcggcagagtgggccgacccgctttattcagattcatttggaaatggaagactctctgcctttggttcaggcacatatggtggcggatcaggtagagcaggctattttacggcgttttccgggaagcgatgtaattatccatcaggacccctgttccgtcgtacccagggagggtaaacggtctatgcttagttaatcagtataaaagagagccagacccgcattttgtgtataaaataccgccatttggcctgacctgaatcaattcagcaggaagtgattgttatactatttgcacattcgttggatcacttcgatgtgcaagaagacttccggcaacagatttcattttgcattccaaagttcagaggtagtcatgattaagaaaatcggtgtgttgacaagcggcggtgatgcgccaggcatgaacgccgcaattcgcggggttgttcgttctgcgctgacagaaggtctggaagtaatgggtatttatgacggctatctgggtctgtatgaagaccgtatggtacagctagaccgttacagcgtgtctgacatgatcaaccgtggcggtacgttcctcggttctgcgcgtttcccggaattccgcgacgagaacatccgcgccgtggctatcgaaaacctgaaaaaacgtggtatcgacgcgctggtggttatcggcggtgacggttcctacatgggtgcaatgcgtctgaccgaaatgggcttcccgtgcatcggtctgccgggcactatcgacaacgacatcaaaggcactgactacactatcggtttcttcactgcgctgagcaccgttgtagaagcgatcgaccgtctgcgtgacacctcttcttctcaccagcgtatttccgtggtggaagtgatgggccgttattgtggagatctgacgttggctgcggccattgccggtggctgtgaattcgttgtggttccggaagttgaattcagccgtgaagacctggtaaacgaaatcaaagcgggtatcgcgaaaggtaaaaaacacgcgatcgtggcgattaccgaacatatgtgtgatgttgacgaactggcgcatttcatcgagaaagaaaccggtcgtgaaacccgcgcaactgtgctgggccacatccagcgcggtggttctccggtgccttacgaccgtattctggcttcccgtatgggcgcttacgctatcgatctgctgctggcaggttacggcggtcgttgtgtaggtatccagaacgaacagctggttcaccacgacatcatcgacgctatcgaaaacatgaagcgtccgttcaaaggtgactggctggactgcgcgaaaaaactgtattaatgatttcggaaaaaggcagattcctttaccctgaaaccgatgacagaagcaaaaatgcctgatgcgcttcgcttatcaggcctacatgaattctgcaatttattgaatttgcaaacttttgtaggccggataaggcgttcgcgccgcatccggcatggacaaagcgcactttgtcagcaatatgaggcggatttcttccgcctttttaatccctcaacatatacccgcaagttatagccaatctttttttattctttaatgtttggttaaccttctggcacgctttgctcatcacaacacaacataagagagtcgggcgatgaacaagtggggcgtagggttaacatttttgctggcggcaaccagcgttatggcaaaggatattcagcttcttaacgttagttatgatccaacgcgcgaattgtacgaacagtacaacaaggcattcagcgcccactggaaacagcaaactggtgataacgtggtgattcgtcagagtcacggtggcagtggtaaacaagcgacgagcgtaatcaacggtattgaagctgatgttgtcacgctggctctggcctatgacgtggacgcaattgcggaacgcgggcggattgataaagagtggatcaaacgtctgccggataactccgcaccgtacacttccaccattgttttcctggtacgtaagggaaatccgaagcagatccatgactggaacgatctgattaaaccgggtgttagcgtgatcacgcctaatccgaaaagctctggtggcgcgcgctggaactacctggcagcctggggctacgcgctgcatcacaacaacaacgatcaggcaaaagcacaggattttgttcgggcactgtataaaaacgtcgaagttctggattctggcgcgcgtggctccactaacacttttgtcgagcgcggaattggcgatgtactgattgcctgggaaaacgaagctctgctggcagcgaatgaactggggaaagataaattcgaaatcgtcacgccgagtgagtctatcctcgcagagccaaccgtgagcgtggtcgataaagtggtcgagaaaaaaggtactaaagaggtggcggaagcctacctgaaatatctctacagcccagaaggtcaggaaattgccgcgaaaaactactaccgtccgcgcgacgctgaggtggcgaaaaagtacgaaaatgcgtttccaaagctgaagttattcaccattgatgaagagttcggcggctggacgaaagcgcaaaaagagcattttgctaacggcggtacgttcgatcagatcagcaaacgctgatttccccaggataattatcaaacccggtggtttctcgcgaccgggttttttatttgtcacgattttgcgttacccttgcatctctttgaggtacagggaaaaaaagatgaaaaaagcgggtcttctttttttggtgatgatagttatcgccgttgtggctgccggtattggttactggaaattaaccggtgaagagagcgatacattacgtaagattgtccttgaggaatgtttgcccaatcagcagcaaaatcaaaatcctagcccatgtgcggaagtcaaacccaatgccggatacgtggttttaaaagatcttaatggcccactgcaatatctgttgatgccaacgtatcgtattaacggtactgaaagtcctttgttgaccgatcctagtacgccgaacttcttttggttggcttggcaggcgcgtgattttatgagcaaaaaatacggccagccggttcccgatcgcgcggtttctttggcgatcaactcccgcaccgggcgtacgcaaaaccattttcatattcatatctcttgtattcgtcctgatgtgcgcaaacagctggataacaatctggcgaacatcagcagccgctggttgccactgccaggtggtttgcgcgggcatgaatacctggcgcgtcgggtaacggaaagcgaactggtacaacgcagcccatttatgatgctggcagaagaagtacctgaggcgcgggaacatatgggacgctacgggctggcgatggtacggcagagtgataacagttttgtattgctggcgacacaacgaaatctactgacgcttaaccgtgctagtgccgaggaaattcaggatcatcagtgtgagattttgcgttaaggcgaagagttaaggaaagtaagtgccggatatgaaatccggcacctgtcagacttaagcctgtttagccgcttctgcagctttaacgattactgcgaaggcgtcagctttcagagaagcaccaccaaccagcgcgccgtcgatatccggctgagcaaacagttctgcagcgttagacgcgtttacagagccgccgtactgaatgatcacttgttcagcgatgttagcgtcaactttagcgatgtggtcacggatgaatttgtgaacagcctgtgcctgagccggagttgcagatttgccagtaccgattgcccatacaggttcgtaagcgataaccgcaccttcgaatgccgcagcaccctgagttttcagtaccgcgtcgatctgacgtgcgcaaacttcttcagttttgcccgcttcattttcagcttcggtttcaccgatgcacagaaccggagtcaggccctgctctttcagcaccgcgaattttttcgcgatcagttcgtcagattctttgtggtaagtacgacgttcagagtgaccgatgatgatgtactgtgcgccgatgtctttcagcatagcagcagaggtttcaccggtgaatgcgccggacaggttcaggtccacgttttgcgcacccagcatgatgtggctgccttcagcttcgcgcttcgccatatcgatatacatttccggtggtgcgattgcaaccgcacagccagcaacacctgccagctctttacgcaggttagaaaccagctcgtgaaccatgtggcggctgccgttcagtttccagttacccatcactaaaggatgtcgcattttaattctccacgcttataagcgaataaaggaagatggccgccccgcagggcagcaggtctgtgaaacagtatagagattcatcggcacaaaggctttgctttttgtcatttattcaaaccttcaaggctttcagatagcgccagcttaatcggttcaacagcgaaggtcagccccttttcgccgttgtccgcgacaacataacgcagtgcaccttctgtctcggtgtaataacgtttgtttttccccgccgttagtaggctctgcagttttttctggctttgtgttttggtcattaatggggtgagtgtgcggatcaccgctgccatgtattcctgagctttcgctttcgcggctttttgctctggcccctggatgggtagccaggtcatttgaatgcttttgatttttaaggtaccgcgctccagcgctgtagaagcatacaagttctcattaattttacttgcagcacgagtgagattggctttgtcgggactgctgtcgatggcacgaaattcgttcagtggcaggctgggattctggctgttaaagtcttctcgaaactggctgatggagagatcgaaagtaggggctccagccagcagataaggcgcggtcgttgccgtatctggtgtttgtgcatgcgcctctgttgtaacggttaatgcagaacataagagaaaaaacagcgtacaccctggcttcattgacagtaccttttgttatgactggctccgattaaaacgatatctgtcgcccttgtcaaaagggtagaatcctggaaaagacaaccatcaaggaacttacatgaccatacagcaatggttattcagttttaaagggcgtattggacgccgtgatttctggatttggataggcctgtggttcgcaggcatgctggtgcttttcagtctggcgggtaagaatctactcgatattcagaccgcggcgttttgccttgtgtgcttgctctggccaacagcggcagtaactgttaagcgcttgcatgatcgcgggcgttccggcgcatgggcatttctgatgattgtggcgtggatgctgctggcgggtaactgggcgattttaccgggtgtctggcaatgggcggtggggcgttttgtcccgacgttgattctggtgatgatgcttatcgatcttggtgcgtttgttggcacacaaggcgaaaataaatatggtaaagatactcaggatgtgaagtataaagccgacaataaaagtagtaattaacctttaatatatctcttactgctatttttttccgggattgttatttccacgatgcaaatgacaatacccggaaaatccttctgaactcttcaccttaagcaatatcaaaaaaaatggtaatccataagatcattacttgtttgttcttcccttaacggcgcattattcttaagtcgtaatcgacagagaggcgaatatacagaggtgccctatgaaagatgtcgtagataaatgcagtactaaaggatgtgcgattgatatcggtacggtgattgataacgacaactgtaccagtaagtttagccgcttttttgccacccgcgaagaagcagagtcttttatgaccaaactgaaagagcttgccgccgctacatcctctgcagatgaaggggccagcgtggcctataagattaaggatctggaggggcaagttgagcttgatgcggccttcactttcagttgccaggccgagatgattatttttgagttaagtctgcgtagcttagcttgatggagttgctttagaaggagttaaacatggcttataaacacattggcgtggcaatttccgggaatgaagaagatgccttactggtgaataaagccctggagctcgccagacataatgacgctcacctgacgttaattcatattgatgatggcttaagcgagttgtatccgggtatctacttccctgcaacagaagatattcttcaattgttgaagaataagagcgataacaagctgtataaactgacgaaaaatattcaatggccgaagacaaaactgcgtattgaacgcggagaaatgccggaaacactgctggaaattatgcaaaaagagcagtgcgacctccttgtctgtggtcatcatcacagttttatcaaccgtttgatgccggcatatcgcgggatgatcaataagatgagtgcggatttgctcatcgtgccgtttatcgataagtaaccgcttaccagtaatgctccgctgtcatatggcccggtcggcgacgtaaatgtttcgtcatctgccgggtctctttcagcaactgttgtgtatcgcgcaccatctgtggattgccgcacagcatcacatggctggtttctttattcatcggcaggccaatcgtgctttccagttccccactttcaattaatgccggtatccgtccggtgaggctccccgctgccgtttcccgactgaccaccgtctgaatgcgcagttttccttcgtagcgtttttccagttcctgcatcagtggcaaatagcttaagtcggcggcataacgtgcggcgtgcaccaggaccagatttttgaagcgatctaaatctttacctagttgcagaatgcttaaataagggccaatcgctgtaccggttgccagcatccatagcgtttcgcagtgcggcacttcatcgagcacaaagaatcctgccgcttcgctaaccacctgcacttcatcgcctggtttcagtgccgccagtcgtgggcttaatttgccatcggggacggtgaccaggtaaaactccagatcgggattatcggggctgtttacataggagtaggcgcgctggacgcgttcgccgtcgatttcaaggccaagcttggtaaattgcccggcggtaaacggaagcacgggggcgtgaacggtgagactaaacagggcgtcggtccagttctgcactttagtgactttgcctgttacccaatcagccatgtttttctcctgttttgattgacttgccttatcttcgttctccgaacaaaaaaattccagtcccgaaggactggaaggctcaatcgatcaaatcaatcagaggatgtgcacctgcatttccgggtctttgcgatccagatagtggatggactgaatgcggcgaatggtgcgactcttgccgcggatcagcagcgtttcggtagtcgcgatattgcctttgcggctaatgccttccagcagatcgcctttggtaataccggtggcagagaagatgacgttatcgctgcgcgccatatcgcccaggcgcaatactttaccggcttcgatgcccatcgctttgcagcgtgccagctcctgctcgccaatgcgacgattctcttcgttgtcgcctttgacgtcatgacgcgccagcagacgaccgttcatgtcgccatctaatgcgcggatcaccgccgcagaaactacgccttccggcgcgccaccaataccgtacagcacgtcaacttcgctgtctggcatacaggtgagaatactggccgcaacgtcgccgtccggaatagcaaatacgcgtacgccgagttgctgcatttcagcgataacggcatcgtggcgtggtttagccagaatcgttaccgtcagttcgctcaacggtttgccgagcgccgccgctacattgcgcaggttatccgccagcggcaggttcagatcaatggtgcctttggctcccggcccgacaatcagcttctccatatacatatccggcgcattgaggaagcagcctttatcgcctactgccagcaccgccagcgcgttagcctggcccatcgccgtcatgcgcgtgccttcaatcggatcaacagcaatatctaccgcgtcgccgcgaccagtaccgactttttcaccaatgtagagcatcggtgcttcgtcgatttcaccttcaccaatgacgatggtgccgtcaatgttgacctggttgagcataatacgcatggcgtttaccgccgcgccgtccgcggtgtttttatcgccgcgtcctaaccatttgtagccagccagcgccgcactttcggtgacgcgggaaaattcgatggcaagttctcgtctcatagcaaactctaagcagtaaggaatggcgcgaagtgtagcacaggggaagggagggattattgatgtgtgcggggttgcccccgcacgtttcgggactaccggatgcggcataaacgcttcattcggcatttacattattcgtcgtgttcttcccacgccatcgcgcgtttaaccgcttttttccagcctgcgtaacggtaattacgctcagtggtttcgatgcctggacggaactcgcgctcaatcaccgctttctcttgcagctcgtcgaggttctgccagaagccaaccgccaggcctgcgagataggccgcacccaatgcggtgacttcgcgcacttccgggcgctcaacgcgggtgccgagaatatcggactggaactgcatcaggaaattgtttgctactgcgccaccatccacgcgcagggcgtgcagacggataccagagtcggcctgcatcgcttccagcacgtcacgcgtctgataagcaatagactccagcgtcgcgcgtataatgtggttagcgttcaccccacgagtcagaccgaaaatcgccccgcgcgcatacgggtcccagtacggcgcacccagcccggtaaatgccggaaccacatacacaccattggtgttttgcactttggtggcgaaatattcggaatcgtaggcgtcgttaatcaacttcatttcatcgcgcagccactgaatggatgcgcctgccataaacaccgcaccttccaacgcatagttcacttcgccagtcgggccgcaggcgatggtggtcagcaggccgttttcacttttcaccgctttctcgccagtgttcatcagcataaagcagccagtgccataggtgttcttcgccatcccttctttcacgcacaactgaccaaacagcgcggcctgctggtcaccggcgatcccggagattggaatacgcgtgccgcctttgccgccaatgttagtctgaccgtatacttcggaagaacgacgcacttctggcagcatctcgcgcggaatatccagcacttccagcattttgtcgtcccagtccagggtatggatgttgaacaacatggtacgagaggcgttggtgtaatcggtcacatggacacggccctgagtcattttccagataagccacgtatcaaccgtaccaaacagcaattcaccacgacgtgcacgctcgcgagagccttccacatggtcgaggatccacttcactttggtgccagaaaagtacgggtcaatcaccagaccggtattgctgcggatataatcttctaaaccgtcacgttttaaatgctcgcagatttctgcggtacgacggcactgccagacaatggcgttatagataggcttgccggtttctttttcccagacaatagtggtttcacgctggttcgtaataccgatagctgcaatttgatcggaactgatatcggctttcgccagcacttctaccagcgtggagctttgggtggcccagatttccattgggtcgtgttctacccaacctggttttgggtagatttgctcaaattcgcgctggctcacgctaatgatattggcatcgtgatccattacgaccgcgcgggagctggtggtgccctggtcgagcgcaacgatatattttttttcagtcatgtttaattgtcccgtagtcatattacaggctagctttttgttcactaggagttgtggtttccttttcttccacaacacagatatcgcaaggcaaatggcgaccaatcagtttgcggtaggcaaatgcacctacaatcgcgccaacgatagggccgaaaagcggcaccaggaagtaaggaatgtctctgccgccggtaaaggcgacattgccccagcccgccagccaggcaaagactttcggaccgaagtcacgcgctgggttcatggcaaaacctgtcaatgggcccatagatgcgccaatgaccgcaatcagtagaccaatcagcaagggagccaaagggccgcgtggtacaccgttgccatcgtccgttaacgccaggatcagccccatcagaatagcggtaatcaccatctcaactgcgaaagcctgcacaaaattgatatgaggattagggtaagtagagaaagtgccagccagatcaacactttcaacgctgccgcgaacaatgtgatgagtctgctcgaagtcgaaaaataaattgtagtaaagcccgtaaactaaagccgcagcacagaaagcgccggcaacttgactaacgataaaaggaataactttgcgcttgtcgaaacaggcaaacagccacaatgcaatggtaacagcgggattaagatgcgcgccggaaacccctgcggtcaggtagatggccattgccacccccagtccccaaatgacactgatttcccactgaccaaaagacgcaccagcgacttttagtgctgcaacgcaacccacaccgaagaaaatcaacaacccggtaccgaggaattcagcaatgcactggcctttcaaggtacttgtttgactcataatcggatcctgaagagttaatgtttgttgtatgcgtgaaagtcacggacctccacgatgcttgtaggcatgctgtaaacttatcgttaacgagcaaaaacgagaaatatcgaacttaaaatgtgtgtgcctcgtcataaaatgagcgttatcgcgccatttattccatctgattgtacatgatgcatgtttgttagatcattcgcgcaacaaatttattaacattttcgattgatgtggattatgtcaccaggagaaggatgaaaagtgtggcaaaccgtaatctgcaaggcgtgccgctggacagcgatggcgcggcttcatacaatcggagctaactaaagtgcgctcgtatttattaaggcgtcaccggtaatcgggacgaggatttttatccatcaacgccttgcaattcaggagaggtatgacaatgagtttagaagtgtttgagaaactggaagcaaaagtacagcaggcgattgataccatcactctgttgcagatggaaatcgaagagctgaaagaaaaaaacaacagtctgagccaggaagttcaaaatgcccagcatcagcgcgaagagctggagcgtgagaacaaccatctgaaagaacagcagaacggctggcaggaacgtctgcaggccctgctgggtcgcatggaagaggtctgattacgcttcatcttccgcgtaatttctttactgtgtaggccaacaggtaacgcagaaaaaaggcaccttgcggtgcctttcttatcattcaatatccagcggatcttcactaagaataatcccggtattgtcggcataaagatggtcgccggagaagaaggtgacaccgccaaaattgacgcggacatcgctttcgccaatgccttcgccagcggcaccaaccggaattgccgccatcgcctggatgccgatatccaactcttccaggtcatctacctgacgcaccgcgccgtaaatgaccagaccttcccattcattttgtactgccagacgcgccagttcagcatcgaccagtgcgcgacgaacagaaccaccgccatcgacgacaagaacacgaccacggccattctgttcgagcagatcgtacagcaacccgttgtcctcgaaacattttaccgtgattatttgtccgccaaagctcgcccgtccgccaaagttggagaacagcggttccacgacgttaacatcttcttgatagatgtcacaaagctcggaagtatcgtatttcataggcttaacattcagttgctgcgagaattttcagtatatcgcgctatgtgggctgttggcaaaatcatcaattgttaattgatatttgtcagttatgctgcccactggcttaggaatatccctaaaacaaacagcaggttagtcagtaacgctcccttgacagtacgttccagcattggtcgcatcgccaccgggtccatttcccgcatcacataacgggcttgcttcaccagtaatggtgccgccagcaggaacagccagccccacaggctatgcaggctaaagagattaaacagcgccagacacaccaggctgcccatcagcaggcaggcatgataacgacgcgcgttcacttcacctaagcgcaccaccagcgtgtttttgccattttcgcggtcgctattgatatcacgcaggttattaatattcagtactgccgttgccagcaggccgcatgcggtcgccggaaggatcagtgccggaatcaatgtatgagcctgtaaataccagctccccatgacactcaaccagccaaagaaaaccagtacggaaatatcacccagaccgatataaccataaggacgattgcccacggtgtaggtgatagcggcaatgatgctcaacccgccaagaatcaggaaaccgacaaaatcggccagcgtatggcatgccactgcaaccagtgccagcccggagagacagatgagcacgacggtaataatgagcgcccgtttcatctcttgctgggtaatgacccctttttgcatgccgcgtagcggcccaatgcggtcaggtttatcgctgccttttaccgcatcgccgtaatcattggcgaggttagaaaggatctgtaatagcccggcggtaattagtgccagcagggcgaccagcggatcgaagtgaccttgccaccatgccagcgctgtcccgacgataattgcagcaaaggcgagggggagggttttaggtcgtaaactttccagccacgcctgagttcggctaatttgttgttcagtcataatacgcgccaataaaaatggggcctttcagccccatcaaacaatgatgaaaatgattgaacgcgattataggataaaacggctcagatcttcatctgccaccaacgcatccagatgtttgctcacataatctgcgtcaatagtgatattttgaccgcttaaatcgctggcgtcgtaggaaatctcttccattaaacgctccagaacagtgtgtaaacgacgagcaccgatgttttcggtagattcgttcacctgccatgccgcttccgcgatgcgtttaataccggagtcggtaaactcgatatttacgccttcagtcgccatcagtgctttgtactgcacggtgatagaggcattcggctcggtcagaatacgctcgaagtcgctggtggtcagcgcctgcagttcaacgcggattggcagacgaccttgcagttccgggatcaggtcagacggtttcgcaatctggaacgcgccagaagcgataaacagaatgtggtcagttttgaccatcccgtgtttggtggaaacggtgcaaccttctaccagcggcagcaggtcacgctgaacgccttcacgagaaacatccggaccggaagactcgccgcgcttacagattttgtcgatttcgtcgataaacacgatcccgtgctgctcaacagcgtcgatagcgtcttgcttcagctcttccgggttcaccagtttcgccgcttcttcttcaatcagcagcttcatggcgtctttgattttcagcttacgcgctttttgcttctggccgcccaggttctggaacatggactgcagctggctggtcatctcttccatgcccggaggagccataatttcaacgcccatcggtgctgcggcaagatcgatctcgatttctttgtcatcaagctggccttcacgcagttttttgcggaatgcctgacgagcagcggacggttcctgctgctgttcggtctgtccccagttgtttttagcaggtgggatcagcacgtcgagaatacgttcttctgccagttcttcagcgcgataacggtttttctcgatagcctggacgcgtaccattttcacggcggcatcggtcagatcgcgaataatagaatccacttccttaccgacgtagcccacttcggtgaatttggtcgcttcaactttgatgaacggcgcattcgccagcttagccagacgacgggcgatttcagttttaccgacaccggtcgggccgatcatcaggatatttttcggggtcacttcatggcgcagctcttcgttgagctgcatgcgacgccagcggttacgcagagcaatcgccacagaacgcttggcgttgtcctggccgatgatgtgcttatccagttcgctgacgatttcgcgtggggtcatttcagacatgggagatccttacgctttgtagcttaattcttcgatggtgtggaaatggttggtatagatgcaaatgtcgcctgcaatatccaacgccttttcagcaatttcacgggcgctaagttcagtgttttctaacagcgcgcgcgccgcagcctgggcgtaagggccgccggagccgatagcaataagatcgttttctggctgcaccacgtcaccgttaccggtgatgataaggcttgcagtttcatccgcgactgccagcagtgcttcaagtttgcgcagcatgcgatcggtacgccagtcttttgccagctcaacggcggctttgaccagatggccctgatgcatttccagtttacgttcaaacagttcgaacagcgtaaaagcatccgcagtaccgcccgcaaagcccgcgatgactttgtcgttgtacagacggcggacctttttcacgttgcctttcattacggtattgcccaacgtggcctgaccatcaccagcgatgaccacatggccgttacggcgtacgcttactatagttgtcacgagctgaccccttggttacgaatacagagtacaaaccccgtacaaaagtacggggcataatgcaattatagatgggggggattttgagggtttcaacccccggcggcgagccgaatgcagtttgtatgacccgccatcttcaaccgattgagggtgctgtctgcgttctctttgcctttcaccgggccaatgaccacacgattccagccattgttggtggtgattttgctgtcaaagccttcgaacgccagctgagcacgtaccgtctctgcctgttccgcgcctctgaagctaccgcactgcaccatccagcggcgttcgtcttttttctccgccgtcggttttggcgcgtcagcggcacgagcaactggcgcagcttgctgcggcttgctctgcgcagtcgtgtgcgcaggagtttgcagcagatcctggtacggctgctgagaagaagccggtttagactggcgcggttgcgcctgtaccggtgcggcttggctcgtacgcgtctgctgctgccagctttgttcagtcgtacggctctgctgagccaggcgttgctgttccgctaattgctgcgcctgacgttggcgctgtagcgtttgctgacgctgttccggcgtctgttcattccacggaacttcaaccagctgcgttggctgctggcgcatatcagcctgcatttgttcaagaagctgacgttgttctggtgtcagttgctccggcgttttcacttcaccaccggcagaaggttctgtgggcgcacgcactcccggctggcgactttccagctctttaatgtagcgccagcgttcttctggttttggtggtagtccgtttccggtcactttctggctttgcagcgtctcggactcttctttcttgtgatgcgtaatgaagtacagaccaccgataaaggtcacaagaacggcggcagcaatagcgaccatagcgggagaaaccgcaggcagatttcgttgctttttccgactggtgctcttttttcgccggctaggtgccggttggctgcggcgtacataatctcgttgtgccactatcgtttcgctgtatttattcgttcgtcagcccgccatgttacttaagcggcgggcctttgaccagtcacggcagtcttaaaggtttactttaaggtaacgcgcgtgtacttccccggatgataagttcgcagtccattaaacgagagccactgccaacgtgttgcccctgcatttgatcaagcaataacagcatagcttcccgaccgatttcgtaacgcggctgcgcgatggttgtcagcggcggatcacaaaattgcgtcaggtcgatgttatcaaaaccgattatggaaaggtcttccgggactttcagcccctggcgttttgcctgagaaagtgcgccgagcgccatcacatcgctatggcagaagacagcagtaggcggttgtggaagatcaagcagctgctgcatcgctttgcttccggcttcgaaggtgaagtcgccacgggcgatgtattgcggatcaaccataatgccgcagcgacgcagcgcctgaacatagccttgcaggcggtagtgacacagcggcatctcttcgggaccggctatacagccaatccgtttatgcccttgctcatataaataatttactgcatcaaatgcggcggtcagattgtcgatatgaactgtaggcagctccagctccggtgcaaattcgttcgccatcaccatcggcggcagattacgctgttcctcaatgctggcatcaaacggcagcctactacccagcaacaacatgccatcaatttgcttggtgatgatcaaatcgataaaggttttttcctgctgattttgatgcgcacagtcgccaatcagcaccagatatccgtgatttgccgccgtaacttcgataccgcgaataatttcgctaaagaagggatcgcagatatccgggacaatcaccagaatggtgcgggattcattacgcttgacgttgcgccccataggctgcggtaaataacccacttcccgggccgctttttcaacccgattacgggtggcctgggagactttatcgggattcattaatgctcgggagacggtcgctgtagagacttttgccttgagggcaacgtctttcatggtcgcggcagtttcctgcttcttcgctttcacactcactcctcgcctggcacgtcaggcgtactacatccatgtttacttcacatcggcaacatttttagcagatagcgcgtgaaaacggttacagaattttcatgaaaagtgtgatgaatattgaatttttcgatccgcctcgcatcgtgagcggtttaaccctcaatcggatcaacatccagcacccatttcaccttacgggaatccggtattgtattgatgagcgccagcgtaccgttaatgatgtgttgcaagcgcacgcgggaagggtgctgcaacaatatctgccagcgccagcgaccgccacgtttaggtgccagagccggaaccggaccgagaacccacagtttctcgtctgccagtgggctggagaggatcagattacgcagttgttgcaggaacaatggcgcgtgctgattgttatgatcttccgcacgcacaatcacatggctggtccacggcggtagctgcatcattcgccgctcagccagcgcctgttcggcaaaggcgtcgtagcctttatagagcaacgtttgcaacagaggatgttccggatggtgcgtttgcagcaccacttcgccctgtttacccgcacgcccggcacgaccggcgacctgggtgtaaagctgagcgaaacgctctgcgctgcgaaaatcggcagaaaacagcgcgccgtccacgtccagtaatgcaaccagcgtcacatccgggaaatggtgacctttcgccagcatttgtgtaccaatcaaaatccgcgcgccgccgcgatgtacttctgccagttgctgttccagcgcccctttgcggctggtggtatcgcggtcgatacgagaaatgggcacgccggggaacaacggcgcgagcgtctgttcaagctgttcggtgcccagccccacggggaccaggtgcgtggaaccgcaggaagggcactggcgcggcaccggacgctgactgtcacagtggtggcagcgcagatggtgctgcgcctgatgcagcgtgtagtagtgatcgcaacgtgggcattcggcaatccagccacagtcgtggcacagcagtgcaggcgcaaagccacggcggttaagaaagagaatgacctggttatcagcctgtaaatgctggcgcatacgagtgattaacgccggagccagacctgcctgcaccttctgaccttttaaatccagcacatgttgaattgccggacgcgcattccctgcccgacgggtcaggcgcagcaggcggtattttttctgctggacgttgcataacgtttccagcgcgggcgttgcggagccaagaataatcgggatttgctcgctgtgcgcacgatacaccgccaggtcgcgggcatgatagcgccagccttcctgctgcttgtaggagctgtcgtgctcttcatcaatgacaatcacgccgagatttttaaacggcgtaaacagcgcggagcgggtgccgatcacaatcgccgcctcaccatttttcgctttcagccacgcgctaagacgctcgctgtcgttcaggccggaatgcagaacttccacgggggcattaaaacgttcacgaaaacgggcgatagtttgcggtgtcaggccgatttccggcaccatcaccagcgcctgtttgccctgagcgagcacgttttccagtacgctgagataaacctccgttttaccggaaccggtaacgcccgccagcagccaggcagaaaaagtatctgccgcgctatgaattgcgccaacggcggtggcctgttcggtattcaatcgcaaccgctcaccagaaacggcatagttcgttcgccagtcgctaaactctggtgtttcacttgctaaatcacacagaccttttttgcgtagcgcctgcaacgcggcatcattaaattcgagcgtggcgacctggtcgcgccagattttgccttgccgtaacgccgccagcgcctgttgttgcttgggggagcgtttcaggctgttcagatccaccgcctggccttgttcagtggcaaaccagtaccacatcggcgcgttcgccgcaggccgcccctggcgtagtaaaatcggcaaggcatgaaacagcacatcgccaatcggatgatgatagtaatctgccgcccatagcagcaatcgccagacggagtgagtaaacaccggctcactatccagcacttcgactaccgcttttagctcattgagcggcagttcgctggcatcgctaacacttaccacaatcccgatgcgctcctgctgtttgccaaacggcacgcgcacgcgacacccagctttaaccgtcatgccttctggcagcagatagtcaaaggtacgaggaagcggaacgggcaaggcaacgtgggcaacgggcatagcatcatcctgacttgaaattcggtgggttagtatacacattgccgtagaagagtgcggatcagtttgcatacgctggttaatttctgtatgatttcgcgccttcgtacgaaatgatcgtattgaagctatacttttaacatcgcgtggtgtctggcgttagggctggaagagcgacgcggccttaaaccgaggttttcccatgaaaaaagatattcacccgaaatacgaagaaattactgctagctgctcttgcggtaacgtaatgaaaatccgctccaccgttggtcatgacctgaacctcgacgtgtgcagcaagtgccacccgttcttcactggcaaacagcgtgatgttgctaccggtggccgtgttgaccgcttcaacaagcgtttcaacatcccgggcagcaaataagaccggatttccgaaaaaagcgccgcacggcgctttttttgtgcctgaattttggtcgtattaccagctaaacagcggccattctttggcgaccgtggtgagttgtggcgcatcgaaaacggcttgtgggctgaccaccgtttcctcaagcggaatattcttgccgtaacgttctttgagctttgcctgaacttgtgggctgctcaggtcgaactctttcaacttctgctgctcgcccacgcgcattcccagcgcgttctggtaaaccttccacaccacttcgctacagtactggcgatcgtcgctccaactgaagctgaaatcatacggtttaccgagataacgttttgccgtttgcgccagtttttgctgttgttcaacactcagtccgccttcaacgcggcgaacaacgtatttgcccttttcaccatgggcgatccactgcttgagcggggtgtatttcaccgggccgactgcttcaaaaacgtagggctttttgttgcgtatcaccagcataccggtgtggctataatcggtatgggtcgccagttggatcgctttactttggctactgcgagagatctgaaagatgatgtcgccggtttgtggctgccaggcaaaggcaggtacagaaaccagcaggctgaggatcagcagcctgtttttcatagttaaacgtccatgtataaaaagcggtgggtcgcagacaacgtgctcgttgtttatgccggatgcggcgtgaacgccttatccggcctacaagttcgtgcaaattcaataaattgcaatatgacgtaggcctgataagcgtagcgcatcaggcgattccactccgcgccgctcttttttgctttagtattcccacgtctccgggttaatccccatctcacgcatgatctcttttgccgcttccgggatttcgtcgctgcgctctttacgcagatcggcatcatccggcaaaggttgcccggtaaaggcatgcagaaacgcttcgcacagcagctcgctgttggtagcgtgacgcaggttgttcacctgacgacgcgtgcgttcatcggtgaggatttttaacaccttaagaggaatggaaaccgtaatctttttgacttgttcactcttcttgccgtgctcagcgtatgggctgatatattcgccgctccattcagccatgagatacttaatcctcttcgtcaataaattgagaccagaccacacagttgatgtgggtactgaccgtaaacccgcatagtttaccgtacaggcgttaccgtgacatcgtgtaatgcacctgtcggcgtgataatgcatataattttaacggctatttgggatttgctcaatctatacgcaaagaagtttagatgtccagatgtattgacgtccattaacacaatgtttactctggtgcctgacatttcaccgacaaagcccagggaacttcatcacatgacgcgtaaacaggccaccatcgcagtgcgtagcgggttaaatgacgacgaacagtatggttgcgttgtcccaccgatccatctttccagcacctataactttaccggatttaatgaaccgcgcgcgcatgattacagccgtcgcggcaacccaacgcgcgatgtggttcagcgtgcgctggcagaactggaaggtggtgctggtgcagtacttactaataccggcatgtccgcgattcacctggtaacgaccgtctttttgaaacctggcgatctgctggttgcgccgcacgactgctacggcggtagctatcgcctgttcgacagtctggcgaaacgcggttgctatcgcgtgttgtttgttgatcaaggcgatgaacaggcattacgggcagcgctggcagaaaaacccaaactggtactggtagaaagcccaagtaatccattgttacgcgtcgtggatattgcgaaaatctgccatctggcaagggaagtcggggcggtgagcgtggtggataacaccttcttaagcccggcattacaaaatccgctggcattaggtgccgatctggtgttgcatagttgcacgaaatatctgaacggtcacagtgacgtagtggccggcgtggtgattgctaaagacccggacgttgtcactgaactggcctggtgggcaaacaatattggcgtgacgggcggcgcgtttgacagctatctgctgctacgtgggttgcgaacgctggtgccgcgtatggagctggcgcagcgcaacgcgcaggcgattgtgaaatacctgcaaacccagccgttggtgaaaaaactgtatcacccgagcttgccggaaaatcaggggcatgaaattgccgcgcgccagcaaaaaggctttggcgcaatgttgagttttgaactggatggcgatgagcagacgctgcgtcgtttcctgggcgggctgagcttgtttacgctggcggaaagtttagggggagtggaaagtttaatctctcacgccgcaaccatgacacatgcaggcatggcaccagaagcgcgtgctgccgccgggatctccgagacgctgctgcgtatctccaccggtattgaagatggcgaagatttaattgccgacctggaaaatggcttccgggctgcaaacaaggggtaaaaatgagtgtgattgcgcaggcaggggcgaaaggtcgtcagctgcataaatttggtggcagtagtctggctgatgtgaagtgttatttgcgtgtcgcgggcattatggcggagtactctcagcctgacgatatgatggtggtttccgccgccggtagcaccactaaccagttgattaactggttgaaactaagccagaccgatcgtctctctgcgcatcaggttcaacaaacgctgcgtcgctatcagtgcgatctgattagcggtctgctacccgctgaagaagccgatagcctcattagcgcttttgtcagcgaccttgagcgcctggcggcgctgctcgacagcggtattaacgacgcagtgtatgcggaagtggtgggccacggggaagtatggagcgcacgtctgatgtctgcggtacttaatcaacaagggctgccagcggcctggcttgatgcccgcgagtttttacgcgctgaacgcgccgcacaaccgcaggttgatgaagggctttcttacccgttgctgcaacagctgctggtgcaacatccgggcaaacgtctggtggtgaccggatttatcagccgcaacaacgccggtgaaacggtgctgctggggcgtaacggttccgactattccgcgacacaaatcggtgcgctggcgggtgtttctcgcgtaaccatctggagcgacgtcgccggggtatacagtgccgacccgcgtaaagtgaaagatgcctgcctgctgccgttgctgcgtctggatgaggccagcgaactggcgcgcctggcggctcccgttcttcacgcccgtactttacagccggtttctggcagcgaaatcgacctgcaactgcgctgtagctacacgccggatcaaggttccacgcgcattgaacgcgtgctggcctccggtactggtgcgcgtattgtcaccagccacgatgatgtctgtttgattgagtttcaggtgcccgccagtcaggatttcaaactggcgcataaagagatcgaccaaatcctgaaacgcgcgcaggtacgcccgctggcggttggcgtacataacgatcgccagttgctgcaattttgctacaccagtgaagtggccgacagtgcgctgaaaatcctcgacgaagcgggattacctggcgaactgcgcctgcgtcaggggctggcgctggtggcgatggtcggtgcaggcgtcacccgtaacccgctgcattgccaccgcttctggcagcaactgaaaggccagccggtcgaatttacctggcagtccgatgacggcatcagcctggtggcagtactgcgcaccggcccgaccgaaagcctgattcaggggctgcatcagtccgtcttccgcgcagaaaaacgcatcggcctggtattgttcggtaagggcaatatcggttcccgttggctggaactgttcgcccgtgagcagagcacgcttagcgcacgtaccggctttgagtttgtgctggcaggtgtggtggacagccgccgcagcctgttgagctatgacgggctggacgccagccgcgcgttagccttcttcaacgatgaagcggttgagcaggatgaagagagcttgttcctgtggatgcgcgcccatccgtatgatgatttagtggtgctggacgttaccgccagccagcagcttgctgatcagtatcttgatttcgccagccacggtttccacgttatcagcgccaacaaactggcgggagccagcgacagcaataaatatcgccagatccacgacgccttcgaaaaaaccgggcgtcactggctgtacaatgccaccgtcggtgcgggcttgccgatcaaccacaccgtgcgcgatctgatcgacagcggcgatactattttgagcatcagcgggatcttctccggcacgctctcctggctgttcctgcaattcgacggtagcgtgccgtttaccgagctggtggatcaggcgtggcagcagggcttaaccgaacctgacccgcgtgacgatctctctggcaaagacgtgatgcgcaagctggtgattctggcgcgtgaagcaggttacaacatcgaaccggatcaggtacgtgtggaaagcctggtgcctgctcattgcgaaggcggcagcatcgaccatttctttgaaaatggcgatgaactgaacgagcagatggtgcaacggctggaagcggcccgcgaaatggggctggtgctgcgctacgtggcgcgtttcgatgccaacggtaaagcgcgtgtaggcgtggaagcggtgcgtgaagatcatccgttggcaagtctgctgccgtgcgataacgtctttgccatcgaaagccgctggtatcgcgataaccctctggtgatccgcggacctggcgctgggcgcgacgtcaccgccggggcgattcagagcgatatcaaccggctggcacagttgttgtaatttcagaaatttaataatgcccggtactcatgttttcgggtttatggtttctaatgaaatatattgaattatcataggattaggccggattaagcgtttacgacgaatccggcaagaagcaataagtacatggttagtttatatttgcagtccggtttgctttgcataccggattttctttttcttaccatcctgaagttttttcatcttccctgatttttcctcaccatcattggtcatttttcggttgacgcccttcggcttttccttcatctttacatctggacgtctaaacggatagatgtgcacaacacaacatataactacaagcgattgatgaggtaaggtatgagcttttttcacgccagccagcgggatgccctgaatcagagcctggcagaagtccaggggcagattaacgttagcttcgagtttttcccgccgcgtaccagtgaaatggagcagaccctgtggaactccatcgatcgccttagcagcctgaaaccgaagtttgtaagcgtgacctatggcgcgaactccggcgagcgcgaccgtacgcacagcattattaaaggcattaaagatcgcactggtctggaagcggcaccgcatcttacttgcattgatgcgacgcccgacgagctgcgcaccattgcacgcgactactggaataacggtattcgtcatatcgtggcgctgcgtggcgatctgccgccgggaagtggtaagccagaaatgtatgcttctgacctggtgacgctgttaaaagaagtggcagatttcgatatctccgtggcggcgtatccggaagttcacccggaagcaaaaagcgctcaggcggatttgcttaatctgaaacgcaaagtggatgccggagccaaccgcgcgattactcagttcttcttcgatgtcgaaagctacctgcgttttcgtgaccgctgtgtaagcgcgggcattgatgtggaaattattccgggaattttgccggtatctaactttaaacaggcgaagaaatttgccgatatgaccaacgtgcgtattccggcgtggatggcgcaaatgttcgacggtctggatgatgatgccgaaacccgcaaactggttggcgcgaatattgccatggatatggtgaagattttaagccgtgaaggagtgaaagatttccacttctatacgcttaaccgtgctgaaatgagttacgcgatttgccatacgctgggggttcgacctggtttataaatagtgtggcttttgtgaaaatcacacagtgatcacaaattttaaacagagcacaaaatgctgcctcgaaatgagggcgggaaaataaggttatcagccttgttttctccctcattacttgaaggatatgaagctaaaacccttttttataaagcatttgtccgaattcggacataatcaaaaaagcttaattaagatcaatttgatctacatctctttaaccaacaatatgtaagatctcaactatcgcatccgtggattaattcaattataacttctctctaacgctgtgtatcgtaacggtaacactgtagaggggagcacattgatgagcacgagtgacgatatccataacaccacagccactggcaaatgcccgttccatcagggcggtcacgaccagagtgcgggggcgggcacaaccactcgcgactggtggccaaatcaacttcgtgttgacctgttaaaccaacattctaatcgttctaacccactgggtgaggactttgactaccgcaaagaattcagcaaattagattactacggcctgaaaaaagatctgaaagccctgttgacagaatctcaaccgtggtggccagccgactggggcagttacgccggtctgtttattcgtatggcctggcacggcgcggggacttaccgtagtatcgatggacgcggtggcgcgggtcgtggtcagcaacgttttgcaccgctgaactcctggccggataacgtaagcctcgataaagcgcgtcgcctgttgtggccaatcaaacagaaatatggtcagaaaatctcctgggccgacctgtttatcctcgcgggtaacgtggcgctagaaaactccggcttccgtaccttcggttttggtgccggtcgtgaagacgtctgggaaccggatctggatgttaactggggtgatgaaaaagcctggctgactcaccgtcatccggaagcgctggcgaaagcaccgctgggtgcaaccgagatgggtctgatttacgttaacccggaaggcccggatcacagcggcgaaccgctttctgcggcagcagctatccgcgcgaccttcggcaacatgggcatgaacgacgaagaaaccgtggcgctgattgcgggtggtcatacgctgggtaaaacccacggtgccggtccgacaagtaatgtaggtcctgatccagaagctgcaccgattgaagaacaaggtttaggttgggcgagcacttacggcagcggcgttggcgcagatgccattacctctggtctggaagtagtctggacccagacgccgacccagtggagcaactatttcttcgagaacctgttcaagtatgagtgggtacagacccgcagcccggctggcgcaatccagttcgaagcggtagacgcaccggaaattatcccggatccgtttgatccgagcaagaaacgtaaaccgacaatgctggtgaccgacctgacgctgcgttttgatcctgagttcgagaagatctctcgtcgtttcctcaacgatccgcaggcgttcaacgaagcctttgcccgtgcctggttcaaactgacgcacagggatatggggccgaaatctcgctacatcgggccggaagtgccgaaagaagatctgatctggcaagatccgctgccgcagccgatctacaacccgaccgagcaggacattatcgatctgaaattcgcgattgcggattctggtctgtctgttagtgagctggtaagcgtggcctgggcatctgcttctaccttccgtggtggcgacaaacgcggtggtgccaacggtgcgcgtctggcattaatgccgcagcgcgactgggatgtgaacgccgcagccgttcgtgctctgcctgttctggagaaaatccagaaagagtctggtaaagccagcctggcggatatcatagtgctggctggtgtggttggtgttgagaaagccgcaagcgccgcaggtttgagcattcatgtaccgtttgcgccgggtcgcgttgatgcgcgtcaggatcagactgacattgagatgtttgagctgctggagccaattgctgacggtttccgtaactatcgcgctcgtctggacgtttccaccaccgagagtctgctgatcgacaaagcacagcaactgacgctgaccgcgccggaaatgactgcgctggtgggcggcatgcgtgtactgggtgccaacttcgatggcagcaaaaacggcgtcttcactgaccgcgttggcgtattgagcaatgacttcttcgtgaacttgctggatatgcgttacgagtggaaagcgaccgacgaaagcaaagagctgttcgaaggccgtgaccgtgaaaccggcgaagtgaaatttacggccagccgtgcggatctggtgtttggttctaactccgtcctgcgtgcggtggcggaagtttacgccagtagcgatgcccacgagaagtttgttaaagacttcgtggcggcatgggtgaaagtgatgaacctcgaccgtttcgacctgctgtaatctgaccccgttcagcggctgcttgctggcagtcgctgaacgttctttaccagcgtatagtgggcgaacgaaaactacacactggatctctcatgtctgccgcaggaaagagcaacccactggcaatcagtggcctggttgtgctcacacttatctggagttatagctggattttcatgaagcaagtcaccagttacatcggtgccttcgactttaccgccttacgctgcattttcggcgctctcgttttattcatcgtccttttattacgtggtcgcggaatgcgcccgacaccgtttaaatacaccttagccattgccctgttacaaacctgcgggatggttggtctggcgcagtgggcgttggtcagcggaggtgcggggaaggtggcgatcctgagctataccatgccgttctgggtggtgattttcgccgcgttgtttctcggtgaacgcctgcgacgtgggcaatatttcgcgattctgattgccgctttcggcttatttttggtgttgcagccgtggcaactcgatttctctagcatgaaaagtgccatgctggcaatcctctccggcgtcagttggggggcgagcgcgattgttgctaaacgtctgtatgcccgtcatccgcgcgtggatttattgagcttaacatcctggcagatgctgtatgcggcgctggtgatgagtgtggtcgctttactggtgccgcaacgtgaaattgactggcagcccaccgtgttctgggcgctggcctacagtgcgattctggcgacggcactggcgtggagcttatggttgtttgtattgaaaaacttgcctgccagtattgccagcttaagcacactggccgttcccgtttgcggcgtactcttttcctggtggctgctcggcgagaatccgggggccgttgaaggtagcggtattgtgctgattgtgctggcactggcgctggtgagccgtaagaaaaaagaagccgtcagtgtaaaaaggatctgaattttttcttcatgtggggcgatctcttatttaacaaaataacgataatgccccaccatccgccagttaaacagcacatcttcttcctgcgcgcctgcgccaatgttatgtatcaccagcggcgtaccgtcgcgggcgaagccatcactaaccaccccaatatgtgccagcccgttatccagtcgccaggagacaatatcgcccgcttgatagtcactggggttcttgctggtggggcgtgttttatcatggcggctaaaccaggtttccagattaggcacccgacggtgatcgatgttgctgtccgggcgctttaacttccatttttgcgggtactcagcaaaattcttcgccatatcttcgtgaaccagtttctgcaaatcgaccttctggctgcgcaatgcgcggatcaccacatcggaacatacaccgcgttcttgcggaacatcaccgccaggataagtaagctgcacatacgccggatcgtaaaatagcgtgctgccaatttgctgtctggcaccgtctgcgatggcaaggttggtattggcctggatttgtaccacggttggtggaacggcgggagattttaaggagtggctggtaaatgccgttagcaggctgagcagcgccagactagctttcatctggttcgtccgtgaaaataagagtcacagattcgaccttccgggctaacgattgttctgtagagaaaatgtccagaagcggataaaaaattcctgaacaacgtgggagtttcagattactggcacagagtgccggatgcggagtgaacgccttatccggcctacaaaagcacgcaaattcaatatattgcagagattgcgtaggcctgataagcgtagcgcatcaggcaattttgcgttcaaactcccggacaagccgggagtttggagtaggttattcccactcttgcaggaaacgctgaccgtactggtcggctaccagcagagcggcgtaaacctgatctggcgtcgcgccgccaggcatgttgtgaatggtttcaccttctgcacatgccgcttctgccacaattcgcattttcgccgggacatcttctttaatatccagttgagcgagagttattggcaaacctaccgcatggctaagggcagctacggtttcgatttcctccaccggcgcattttccagaaccagctgcgtcagcgtaccgaatgccactttttcaccgtgataatagtgatgcgcgtccgggatagcggtcaggccgttatgcactgcgtgcgccgcagccagaccaccactttcaaaaccaacaccgctcaaataggtgttcgcttcaatcacgcgctccagcgccggagtcactacatgctgttcggcagcaagcatcgctttttcgccttcttccagcagggtgttgtagcacagttcagccagtgccagcgcagcctgggtgcacttgccgcccgccatggtggtcgcgccgctacgagagcaggcacgcgcttcaaaccaggttgccagcgcatcgccgatacccgccgctaacagacgtgcaggtgcgccagcgacgattttggtgtcgacaatgaccatattcgggttatttggcaacagcagatagcggtcaaactcaccctcatcggtgtagataacagacaatgcgctgcacggtgcatcggtagaggcgatagtcggtgcgatcgctaccggaacacccatgaaatgtgccagtgctttggcagtatcgagggtttttccgccaccgataccgagaattgcgccacactgcgcagtctccgcgatgccacgcagacggtcgatctcattttggctacattcaccgccaaacggcgcaatttctactaccagtccagcatctttaaagcttttctcgacagtggattgagcaaaacctaaaacaaatttgtcacccaccactaaccagcgttctgccagcggcttcaggtattcgcccagacgattaatcacatcagcgccctggatgtatttacccggactttgaataatgcggtccataattgctcctttagagatgagtagtgccaaatgcggcattccagtcgtgttcgaacttctctatagcactctctaccgcaggggtgttgagcatttgttgcgctacatctaagggcagggtgatggattcacatcctgccagtaaacagtccagcgcctgacgcggcgttttaaagctggctgccagcaccatgctttctggcgcgtgcatttctaacagcgtttgcagctcctgaaccgtacgaatgccgtctccgccctgggcatctacgcggttaacatacggagcaacgtattttgcccctgccagtgcggctaataacccttgtgcggcgctatatacagcagtgccaagtgtagtaataccctcttttttcagtattttaattgctgccagaccttcggaagtcaccgggattttcaccacaatacccggaatagcgtcgcgcaggcgcttcgcttcttccaccatcccctgcgcgtcgcggctcatggtctgagcaaacagaatgccctcatcaccaatcgctttttgcagacgcggcagcacttcccatatggactccttgctggcagcgataatgctcgggttagttgtcaccccggcaatggggaatatgcgtgccagacgttcgacttctgcgacgttagcggtgtccagatacagttccatgatgtttccttttacagttccagttcatgttgcagcaggctggcgatagcgtcggcagaggcggcgttaaccagcgcgttacggaattcttcgtgcatgatgcggcgagcgaggcggctgaaaatgcgcatatgctgatcgcccgcagcgtgtttgttcagggttaacataatgatgaattgcgcttcatcatcgccccagcgcaccggcgcttgcagacgcgccacgctgatggtggattgctcaatgtgttcacttttgctgtgtggaatggcaaaactaaagcccagaccggtagagaaaacggcctcgcgcgcccacaagtcggcttccagtttacgcggatagcggcagcggcccgccagcagcaggttatcggtcatgcctttgagcacttcttctttgctgcgccagtcgctttccagtgtgatgcactcggcggtgaccagcggtgcgtcttgttgggtcatgcggaattgcgccagcaggtgttctacttccaggctagtacggcaggccattgcctggttgagcaacttgcggcactcacggctatcaagttgcgccatccgagctttcgccgccggaatacttggtgcgctcatgctgagttcatccagccctaagccgaccagcaacggcagcacggaacctttcgctcccagctcaccgcacagaccaatccatttgccctggcgatgcaccgcttgcacggcgtaatcgagcgcccgcaagaatgccggattcaggctgttgtagtgacgagtaaccttagcgttatcgcgatccaccgccagcagatactgcgtcaggtcattactaccaatactaaagaaatcaatctcttcgcagcattgatcgatgatgaacatcacgctcggcacttccagcatgatgccgagctggattttctcatcaaacggaatgtgttcgttacgtagttgctgtttggcttccgccagtttttctttcacccataagatctcttccatactggagatcatcgggatcatgattttcaggctgccgtgagcggaggcgcggaggatgctccgtagctgcgtggtaaacaagctcgcgtactcttcataaatacgcacggcgcgataaccgaggaacgggtttgcctctgcgggaatgttcagataatcaacgggtttgtcgccgccaatgtccatagtgcgcacaataatgctgcgtccgttggcggattccagcgcctgacaaaaaatgttgtacaactcgctttcgcccggtgcgctggtgcgatccatatagagcatttcagtgcggaacaaaccaacgccttccgcaccattgccgaatgcggcctgcgcttccacggagtgagcgatgttagcggcaatttcaatgcggataccgtcagcggtacgggcttgttgggtcagccagacacgctgttgctcacgcagggcgtcctgtacgcgggcttcttgctgataataacgagctacggcttcccctggctcaaccacaatcgccccggcgttgccgtcgatataaatcgtttgttgctgccacggagtaagggcatcaatatccacaccaaccagcgttggaatgttgaagctacgggcaaggatcaccgtatgactggtggtgccgccgcttttgagcaacaatcctttgaggtgatttttatccagttcgaggaactggctgggggtcagttcatcagccatacaaatggcgggctgcgtcagtttgcccggtgccgggaagcgttgctcaccgtagatttgctggagtaactggaagcagacgtcgcgtacgtccagggcacgttcttgcaggtagctgctgctggaacgggaaaactcttcgcaaaagtgattcgcgctggcaacaattgcttcggcgcagcttaatccggcgctgacgcctgccagtaaatgttcgcgcagggaagtatcgccagccagggatcggtgagcttccagaatcgcgctggtagcaccgtcgctatccagcagacgaaactcaatgtttttcagtaccagcgtcaggccgttttccagtgcggattgctcggcgtcaacgcctttggctgcgggaagattacccagcgcattgagatctaaagaagagatcggcgtcagaatgccgcctgcactaccgctgcacacggtgcgggcgcggataatttgcggattcagattggtcagactaaccggcagtggttccagttcgtcagatttaacttccgccagcggcgcatcgcagtgggggaattcatcgcgcagccattggcttaaacgctggtgcgcttcctgttcgtcggccccggaaatcagtaactggcagttatcgcccgccagcgtatcggtgccaatcagcgcaagggcgcttttggcgttgcccttgcggtcagtgcgcaggttatgccactcaatttgactactaaaagtattacacagcgtttcaacgtggcttgccggacgcgcatgtacgccgttaggtagctcacaaataaattccacaatcagggccattgcctctctcccggtacggttttctgtttacaggataagagcgcacggcaacggcctgccatgtgacaaatctgccaaaagctggacaaatgtaatgtaaccgtcaatttgcgacgcgtctcacaagacgctgttttgcggcatgcttccggtttatcgcaagttatgaggcggatcgcatttttgtactgatattacaaaagtccagtaaatggcctttttatccactgtttgctccgcctgcgattgcctattgtttcctccatcaaaaatatggacatgggctttcgcaagcccgggagcagcttatgaatgagttggtgcagatcctgaaaaatacccgtcagcatttaatgacgggcgttagtcacatgattcccttcgtggtaagcggcggtattttgctggcggtttccgtcatgttgtatggcaaaggcgcagtgccggatgccgtagccgatccaaatctgaaaaaactgtttgatatcggcgttgcgggcttgacgctgatggtgcctttcctcgcagcgtacatcggttattccattgcagagcgttctgcgctggctccgtgcgctatcggtgcctgggttggtaacagctttggtgcgggcttctttggtgcactgatcgccgggattatcggcggcatcgtggtgcattacctgaagaaaattccggtgcataaagttctgcgcagcgtgatgcctatcttcattattcctatcgtcggcacactgattaccgcaggcatcatgatgtggggcttgggcgagcctgtaggggcgttgaccaacagcctgactcagtggcttcaggggatgcagcagggcagcattgttatgctggcggtgatcatgggtctgatgctggcgttcgatatgggcggtccggttaacaaagtggcctatgccttcatgctgatttgcgttgctcagggtgtttataccgtggtggccatcgctgccgtgggtatttgtatcccgccgctggggatggggctggcgacgctgattggtcgtaaaaatttctccgcagaagagcgcgaaaccggcaaagcggcactggtgatgggctgtgttggcgttactgaaggggcgattcctttcgccgctgccgatccgctgcgtgtcattccttccatcatggtcggtagtgtttgtggtgcagtaactgcggcgctggtcggtgcgcagtgctatgcaggctggggtggtctgattgtgctgccggtggttgaaggcaagctgggttatatcgcagcagtggctgtcggagcagtggtgacggctgtttgtgtgaacgtgctgaaaagtctggcgcgtaaaaatgggtctagcactgatgaaaaagaagacgacctggatttggattttgaaattaattaattgaggaacgagccatgacgaaaattattgcagtaaccgcatgtcctagtggtgttgcccatacctatatggcagcagaggcgctggaaagtgccgcgaaagcgaaaggctgggaagtgaaagtagaaacccaggggagtattggtctggaaaatgaactgactgcggaagatgtggcgagcgctgatatggtgattctgaccaaagatatcggcatcaagtttgaagagcgttttgctggcaagaccatcgtgcgcgtcaacatcagcgatgcagtaaaacgtgctgacgccattatgagcaaaattgaagctcacctggcgcaaaccgcttaagttcttctcccgctcgcaagggcgggttcgctttcccacaggagttcctcatgacgaatcgtatctctcgcctcaaaactgcactgtttgccaatacccgtgaaatcagcctggagcgggcgctgctttataccgccagccatcggcaaaccgaaggcgaaccggtgatattgcgccgggcgaaagcaacagcgtatatccttgaacatgttgaaattagcattcgtgatgaagaactgattgccggtaaccgcaccgtaaaaccgcgcgccgggattatgagcccggaaatggacccttactggctgctgaaagagctggatcaattcccgacgcgtccgcaggaccgctttgctatcagcgaagaagataaacgtatctaccgtgaagagttgttcccgtactgggaaaaacgtagcatgaaagatttcatcaacgggcagatgacagatgaagtaaaagccgcgaccaacacgcagattttcagcatcaaccagacggataaaggccaggggcacattattattgattacccacgcctgttgaatcacgggctgggtgagctggtggcacagatgcagcaacattgtcagcaacagccggagaatcacttttatcaggccgcgttgttactgctggaagccagccagaaacacattttgcgttacgccgaactggcggaaacgatggcggcaaactgcacagatgcccagcgtcgcgaagagctgctgactattgcagagatctcccgccataacgcgcaacataagccgcagacgttctggcaggcgtgccagttattctggtacatgaacatcattctgcaatacgaatccaacgccagtagcctaagcttggggcgcttcgaccagtatatgttgccgttctatcagacaagtttaacccagggcgaagatgcggcgttcctgaaagaactgctcgaatctttatgggtgaaatgcaacgacatcgtgctgttgcgctccaccagtagcgcgcgttatttcgccggtttcccgaccggctataccgcactgctcggcgggttaaccgagaacggacgtagcgcggtgaacgtgcttagcttcctttgccttgacgcctatcaaagcgtgcaattaccgcaaccgaacctcggcgtgcgcactaacgccttgatcgacacgccgttcctgatgaaaaccgccgaaaccattcgcttcggtaccggtattccgcaaatctttaacgatgaagtggtggtgccagcgttcctcaaccgtggcgttagcctggaagatgcgcgcgactattccgtagtgggctgtgtggaattatctattcccggcagaacctacggcttgcatgacatcgcgatgtttaatctgctgaaagtgatggaaatctgcctgcatgaaaatgaaggcaatgctgcgctgacttatgaaggtttactggagcagatccgcgccaagatcagccactacatcaccctgatggttgagggcagcaatatttgtgatatcggccatcgcgactgggcacctgtaccgctgctcagtagctttatcagcgattgtctggaaaaaggccgcgatattaccgatggcggcgcgcgttataacttctccggcgtacaggggatcggtatcgccaacctgagcgattctctccatgcgttgaaagggatggtttttgagcaacagcgtttaagttttgacgaattgctgagcgtattaaaagccaacttcgcaacgccagaaggcgaaaaagtccgcgctcgcttaattaaccgcttcgagaaatacggtaacgatatcgacgaggtggataacatcagcgccgaactgttgcgccactactgcaaagaagtggaaaaataccagaacccgcgcggcggctacttcacgccgggaagctataccgtttctgctcacgtcccgttgggaagcgtggttggcgcgacgccagacggtcgttttgccggagaacagctggcagacggcggcttgagtcccatgctgggccaggacgcacaagggccaacagcggtactgaagagtgtcagtaagctcgataacacgctgctgtctaacggtacgttgctgaacgtgaaattcactccggcgaccctggaaggtgaagcaggattacgcaaactggccgacttcttacgggcgtttacccagcttaagttacaacatattcagtttaacgtggtgaacgccgacacgttgcgggaagcgcaacagcgcccacaagattatgccgggctggtggtgcgcgttgccggatacagcgccttctttgtcgaactgagcaaggagatccaggatgacatcatccgccggacagcgcatcagctgtaattaaactgtcgaaggagatccaggatgacaagttccgccggacagcgcatcagctgtaacgttgtggaaacgcgccgcgatgatgtggcgcgcattttcaacattcagcgttatagtctgaatgacggcgagggcattcgtacggtggtcttttttaaaggctgtccgcatctttgcccgtggtgtgctaatccggagagcatctccggcaaaatccagacggtacgcagagaggcgaaatgtctgcactgtgcgaaatgtttgcgtgatgcggatgaatgcccctccggggcgtttgaacggattggtcgcgatatcagccttgacgctctggaacgggaagtgatgaaagatgacattttctttcgcacgtccggcggcggcgtcacgctttctggcggcgaagtgttaatgcaggcggagtttgctacccgttttttacagcgactgcggctgtggggtgtgagttgcgccattgaaactgccggagacgcaccagccagcaagctattaccgctggcgaaattgtgcgatgaagtgttgttcgatttaaaaattatggacgcgactcaggcgcgggatgtggtgaagatgaacctgccacgcgtgctggagaatctgcgtttgctggtgagtgagggcgtcaacgtgatcccgcgtttaccgctgatccctggtttcacgctcagccgggagaatatgcagcaggcgctggatgtactgatcccgctgaatatcaggcagatccatctgttaccgtttcatcagtacggcgaaccgaaataccgcctgctggggaaaacatggagcatgaaagaggtgcctgcgccgagcagtgctgatgtggcaacgatgcgcgaaatggcagaacgggccggacttcaggttaccgtgggaggttaaaatggcatacctggtggcagtaaccgcctgcgtaagcggcgtggcgcatacttatatggcggcggaacggctggaaaagttgtgcctgttagagaagtggggagtcagcattgaaactcagggcgcgctgggaacggagaatcgtttagcggatgaggatatccgccgggcggatgttgctctgttgattacggatatcgagcttgccggtgccgagcgatttgaacattgccgctatgtgcaatgcagcatctacgcattcctgcgtgagccgcagcgggtaatgagcgcggtgcgcaaagtgctttctgcgccgcagcaaacccatcttattctggagtaattattctggagtagtcggtttttctgtcagttggctgtggtactgccggcgatattcgctcgggctgcgttcggtgtttttacgaaacagacggcagaagtagttgctgtcgacaaagccgcaggcgtgcgccacttcttttaccttcaggtcatagcctttcaataacgtcttagcgtgctccagtcgcgtgtgattcaggtattcgttaaaaccaatggcccccgttttttgaaacaggtggctgaggtaatttgggctaatataaaacgcctgtgcaacagattcgcgggtaagcgcggaggcatagcgttcgtcgatataatcgcgaatagcttcaaatagtgcctggctgcgactggcggtctggatttggctgccaagcaaatcgcggcagtggctaagcaggctggcgacgataagccttgccgtttgctgctcctgcggctgcatttgcatttcattgagcgtttgtagcagaaaagaacctatgcgtgggccgcgtcgggcgacgtgttgcttcgccagattttgatattgtttgccatcccattgcacgacgctgaagccgagttgctgtttgccaaacagcacgctaaaggtagtagcgggggcttgccattgtggaaaattccagccaccagcaggaacgtacagcacatcgccgggaactaacgttgctccagcgccggtatcaacaaactcaccttccagcacaatttccagccgtggaaaatcgacctgatacgcaagatcgggcaccgggccgttactgctggcaaagtaaatctggcgcagggacagcgggccgttgatcaggcgggagagcagatagctgacgtcgtgatacatgttattcccttaggtatgtagacgggaaaacagtaactggcattattaaaaaaggccacctgaaaagtgtggcctgaggggagttcgatgtaaacattgcggcagttgtattgccggatgtggcgtaaacgccttatccagcctaccgccgcgatctgtaggccggataagacgcgtcaagcgtcgcatccggcaaatagcgcctggctgataattactgattacccacctgatcgccatagggcagtgtgtcgtaatcgatcagtgcgtttttcttatacgggttaccaatccagcgggtagtttctttgaactgcggattcaccacactacgggttggatcgtaaccgtcgtaagataagcccgccaaatcactccaggtgtggatcagttccgccaggctgtatttacgatcaacatcctggctgaaatcacggggatgagtcgcttgccatttttcactcgtccacagcaggaacggaatggtgtacatatgacgcgtcgggttgtcctcattacgcccctgagttttgtgcggcggcgtgtcgtaaacctcttcaccgtggtcagagaaataaaccaggaaaccgttcgggtttgctgctttaaagtctttaatcaggctggcaaccacatgatcgttatacaggttagcgttgtcataatcgttataactctccagctcttccgcgtttaatcccggcggaacatgatcggtattgccatcaaacttgccctgattttccgggtagcggtatttgtatttgatatgcgtacccagcagatgaacaatgatcagtttcttcggcgcagggtcattcagcacttcctggaacggcttcagcacgttggtgtcgtattcacgcgcactctgcgtacgttgctggttcatgtagtactgcttgtcggtctggcggctaaataccgtcagcatggtattgcgggcggtcatcgtctgctggttggtgatccagaaggttttataacccgcctgtttcatcatgttcatcaggctcggctgcgtcagatacagatccgggttcttttcattggcaaaggtcagcgcctgttgcaggatttcaatggtgtacggacgagacgtaactacgttattaaacacggtcagattcggatcggttttatgcagcgcatccagctccggcgtggtttcacgcggataaccgtacagactcatgcgtccgcgctgggtgctctcgccaatcaccagcactaaagtgcgcggttcgttaccgctttcatctttgaaattagccagtggcggcaaggcattattttcattcagtaactttgttaggctgtttagttgctgacgatactgataatagccggtcaggaattgccacggtgcggcaggctccatacggctggccaggttatccaacgttttctcaaacggcttgtttttgataaacgtattcatggcgatcggatgcagaatcaagccataaagcagggcaaaagagacaacataacgccacggctttggaatatagaccgggcgcaggcgtgtccacagcagaactgccaccgccgtataggccagcgcgataagcacaattttcaggctgaaatactggcttaaatactcgctggcttcgttggtgttggtttcgaacatcacaaacagaacgctctggctgaactcctgaccgtagatgacgtagtagcacagcgccgccagagaggccgcccatagcaccacgccgattactgcggcaataattttaatccgcttcggaaagaggaataccgggatcaaccacaggctactgaataacaggctgtcgcgaatgccgttagtgccactataaccactgatgtaaataatggcctgtagcagagtagagaaaaaccaaaagtagagcagtgcccaacccagggctttccagctaaaaagaggtttagcctggacttctgtggaatgcatagtaagaacctgtcttgaaaaaatatcgccgaatgtaacgacaattccttaaggatatctgaaggtatattcagaatttgaataaaatgcagacagaaatatattgaaaacgagggtgttagaacagaagtatttcagaaaaccctcgcgcaaaagcacgagggtttgcagaagaggaagattagccggtattacgcatacctgccgcaatcccggcaatagtgaccattaacgcttgttcgacgcgaggatccggttcctggccttctttttctgcctggcgggagcggtgcagcaactcggcctgcaatacgttcagcgggtcggtgtaaatattccgtagctgaatagactctgcaatccacggcagatcggccatcagatgggaatcgttggcaatcgccagcaccactttgatgtcttcttcttgcaggttgcgtaactctttacctaacggccacagtgctttgtctaccaggcgttggtcatagtattccgccagccacaggtctgctttggcgaagaccatctccagcatgccgagacgcgtgctgaagaatggccaatcgcggcacatagcctccagctcgctctgtttgccgtcttcgaccactttttgcagcgccgtacctgcacccagccaggcggggagcatcagacggttttgcgtccaggcgaagatccacggaatggcgcgtagactctcgacgccgccggttgggcgacgtttcgccggacgactacccaacggcagtttgcccagttcttgttccggcgtagcggagcggaagtaaggcacaaaatctttgttttcacgtacgtagccgcggtagacatcgcaggagatgacactcagttcatccataatgcgacgccagctctctttcggctccggcggtggcagcaggttggcttccagaatcgccccggtataaaggctcaggctgctgacggtgatttctggcagaccatatttaaagcggatcatctcgccctgttcggttacgcgcaggccgcctttcaggcttcctggcggttgactcagcagcgccgcatgagcaggtgcgccgccgcgaccaatggaaccgccgcgaccgtggaacaacgtcagctcaatacccgctttttcgcaggttttgattaatgcatcctgtgcctgatattgcgcccaggaagctgccatcactcccgcatcttttgcactgtcggaatagccaatcatcaccatctgtttgccctgaatcaggccacgataccagtcaatattgagcagctgggtcatgacatcgttggcgttgttcagatcatcgagggtttcaaacagcggagcaaccggcatcgcaaacccgatacccgcttctttcagcagcaggtggacagccagtacgtcggacggcgttttcgccatgctgatcacgtaggcggcaatggagccttgcggtgcttcggcaatcacctggcaggtatcgagcacttcgcgcgtttcggcgcttggttgccagttgcgcggcagaagcggacgtttggagttcagttcgcggatcaggaacgcctgtttgtcggcctcactccagctttcgtagtcgccgataccgaggtagcgggtcagctcgcccagcgcttcggtatgacgcgtgctctcctgacggatatcaatacggaccagcggtacgccgaaacatttcacgcggcgcagggtgtcgagcagatcgccgttggcgataatacccatgccacacgcctgaagactctggtagcaagcgtagagcggttcccacagttcttcgttttgtgtcagcaggccttctggttttggcagttcttcgcctttcaggcgcgcttccagccatgcctgtgtcgccatcaggcgagaacgcaggtttttcatcagatagcgatacggttctgcggcaccttcttcgccaaccagcgccagcagttcaggggtcgcttcaaccatgctcagttcagaaaccagcacctgaatatctttcaggaacaaatcggtggctttccagcggctgagtagcaggacgtggcgggtgatatcggcagtgacgttcgggttgccgtcgcggtcgccgcccatccagctagtaaaacggaccggaacaaattcgacgggcagtttgtagccgaggttctcttccagttgttcgttcagttcgcgcaggtaatttggtacgccttgccacaggctgttttccactacggcaaagccccatttggcttcatctaccgggcttggacgcagcttacggatttcatcggtatgccaactctgggcgatcaactggcgcaggcgacgcatcagctggttgtgttcgtagtcagcgatatctttgttatcgagctgttttaaacaggcgttcacttccaccattttgtggatcagtgtacgacgggtaatttcggttgggtgagccgtgaggaccagttccaggctcaggctttccactgcttttttgatggtgtcttcgctcagttccggctggtttttcagtttacgcagggtgcgggcgatcacttccgggttgctggcagcttcgcctttcgggctaatgctgtggtattgctcggcggtgttggccaggttcaggaactgactaaacgcacgcgcaacgggcagcagctcgtcgttgctcaaattttgtaaggtggtgagcaactcctggcggttagcatcattgccagcgcgactagatttgctcaacttacggatagtttctacgcgttcaagaatgtgttctcccaacgcatccttgatggtttctcccagcactttgccgagcatactgacattactacgcaatgcggaatattgttcgttcatattaccccagacaccccatcttatcgtttgatagccctgtatccttcacgtcgcattggcgcgaatatgctcgggctttgcttttcgtcgtcttttataaagccacgtaaaagcggtgacgtcaaatgctgcgaaatcgcttcagcaaacgaataaatagcaggaatttacgtcattaaattcacgacgctttaaataagcgtaacttatggaaatgttaaaaaatcgccccaagtaacaccaaaggtgtaggtcggataagatgcgcaagtatcgcatccgacattattgcggcactggagtttggcaacagtgccggatgcggcgcgagcgccttatccggcctacagttgggcatcgtttgagtcactgtcggtcggataagatgcgcaagtatcgcatccgacattattgcggcactggagtttggcaacagtgccggatgcggcgcgagcgccttatccggcctacggttgggcatcgtttgagtcactgtaggtcggataagatgcgcaagcatcgcatccgacattattgcggcactggagtttggcaacagcgccggatgcggcgcgagcgccttatccggcctacgttttaatgccagcaaaaatggtgaattacctgggttatcagttcgcgggtgggcttgataaaccgtgtttccagatattcatcaggttgatgagcctgattaatactgccaggccccaacaccagcgtcgggcataacgtttgaataaacggcgcttcggtacagtagttcaccacttcggtttttgctccgagcaatttctcaaccacttcaaccagttgatgattcggtgggcattcatagccagggatcggcggatgcagctcgtcgaccgtcagacgacccggccagcgttcgctcaccggagccaatgcatcgttgagcaaaccattaagttcattgagtgtcatgccaggcagcggacgaatatccatatgcaactcacagcaagcgcaaatacggttagaagcgtcgccaccgtgaatatgcccgaggttgagcgtagggtatggcacggtaaacgcttcgtagtgataacgttctttcaggttatcgcgcaattgcaaaatatgcccgatggcgtcgtgcattagttcgatagcgttaactccgcgtgctggatcgctggagtgcccgctctggccctgaatacggatggcgttagagatatgacctttatgtgcgcgtaccggttgtagactcgtcggttcgccaatgatggcgcaatccgggcgcagggcggtagtttcggcaaaataacgcgctccggccatactggtttcttcatcagcagtcgccagaatgtagagcggttttttcagtttcgtgacgtcgacatcgcgtagcgcatcaaggataaacgcaaaaaagcctttcatgtcggcggtgcctaagccgtaaagcttgccgtcatgctccgtcagtgtaaacggatcgcgcgtccagcgaccgtcatcaaatggcaccgtatcggtatgccccgccagcaacaagccgccagccccctgtccgatacttgccagcatattgaatttgttgcgagttcctggaacaggctgcacttccacattgaagcccaaatctttaaaccagtccgccagcagagtgattaaatctgcattgctttgatcgagtgcctcttccgtggcgcttatactaggtgtggcaatcagagcgcggtaaatctcgataaatggcggtaatttgtttttcattgttgacacacctctggtcatgatagtatcaatattcatgcagtatttatgaataaaaatacactaacgttgagcgtaataaaacccaccagccgtaaggtgaatgttttacgtttaacctggcaaccagacataagaaggtgaatagccccgatgttgaatacgctgattgtgggtgccagcggctacgctggcgcagagctagtgacctatgtaaatcgccatccgcatatgaacataaccgctttgactgttagtgcgcaaagcaatgatgcgggaaagttaatctccgatttgcatccgcagctaaaaggcatcgttgatctgccgttgcagccgatgagcgatatcagcgagtttagcccaggggtggacgtagtgtttctcgccaccgcccatgaagttagccacgatttagcgccgcagtttcttgaagcgggctgcgtggtgttcgacctttccggcgcgtttcgtgttaacgacgccaccttctatgaaaaatattacggctttacccatcaatacccggaactgttggaacaggcagcctacggtctggcggagtggtgcggtaataaattaaaagaagcgaatttgattgcggtgccgggctgttatccgacggcggcacagctggcgctgaaaccgttgattgatgccgatcttcttgacctcaatcagtggccggtgatcaacgccaccagcggcgtgagcggtgcagggcgtaaagcggccattagtaacagcttttgtgaagttagcctgcaaccgtatggcgtctttactcatcgccatcaaccagagatcgccacacacctcggtgctgacgttatcttcaccccacatctgggcaatttcccgcgcggcattctcgaaaccattacctgccgcctgaaaagcggtgtgacccaggcgcaagtcgcgcaagtgttacagcaggcgtatgcccataaaccgctggtgcggctgtatgacaaaggcgttccggcgctgaaaaatgtcgttgggctgccattttgcgatatcgggtttgccgttcagggcgagcatctgattattgtggcgaccgaagacaacttactgaaaggcgcggcggcacaagcggtacagtgcgccaatattcgtttcggctatgcggaaacgcagtctcttatttaagggtgcaatgatgaatccattaattatcaaactgggcggcgtactgctggatagtgaagaggcgctggaacgtctgtttagcgcactggtgaattatcgtgagagtcatcagcgtccgctggtgattgtgcacggcggcggttgcgtggtggatgagctgatgaaagggctgaatctgccggtgaaaaagaaaaacggcctgcgggtgacgcctgctgatcagatagacattatcaccggagcactggcgggaacggcaaataaaaccctgttggcatgggcgaagaaacatcagattgcggccgtaggtttgtttctcggtgacggcgacagcgtcaaagtgacccagcttgatgaagagttaggtcatgttggactggcgcagccaggtagccctaagcttatcaactccttgctggagaacggttatctgccggtggtcagctccattggcgtaacagacgaagggcaactgatgaacgtcaatgccgaccaggcggcaacggcgctggcggcaacgctgggcgcggatctgattttgctctccgacgtcagcggcattctcgacggcaaagggcaacgcattgccgaaatgaccgccgcgaaagcagaacaactgattgagcagggcattattactgacggcatgatagtgaaagtgaacgcggcgctggatgcggcccgcacgctgggccgtccggtagatatcgcctcctggcgtcatgcggagcagcttccggcactgtttaacggtatgccgatgggtacgcggattttagcttaagttttgttggccggaggcgcagctttccggcattgaatttcaaaataaggaaacagagttatggcactttggggcgggcgttttacccaggcagcagatcaacggttcaaacaattcaacgacagtctgcgctttgattaccgtctggcggagcaggatattgttggctctgtggcctggtccaaagccctggtcacggtaggcgtgttaaccgcagaagagcaggcgcaactggaagaggcgctgaacgtgttgctggaagatgttcgcgccaggccacaacaaatccttgaaagcgacgccgaagatatccatagctgggtggaaggcaaactgatcgacaaagtgggccagttaggcaaaaagctgcataccgggcgtagccgtaatgatcaggtagcgactgacctgaaactgtggtgcaaagataccgttagcgagttactgacggctaaccggcagctgcaaagcgcgctggtggaaaccgcacaaaacaatcaggacgcggtaatgccaggttacactcacctgcaacgcgcccagccggtgacgttcgcgcactggtgcctggcctatgttgagatgctggcgcgtgatgaaagccgtttgcaggatgcgcttaagcgtctggatgtcagcccgctaggctgtggcgcgctggcgggaacggcctatgaaatcgaccgtgaacagttagcaggctggctgggctttgctagcgcgacccgtaacagtctcgacagcgtttctgaccgtgaccatgtgttggaactgctttctgctgccgctatcggcatggtgcatctgagccgttttgctgaagatctgattttctttaacaccggcgaagcggggtttgtggagctttctgaccgcgtgacttccggtagtagtttaatgccgcagaagaaaaacccggatgcgctggagctgattcgcggtaaatgcggccgggtgcagggggcgttaaccggcatgatgatgacgctgaaaggtttgccgctggcttacaacaaagatatgcaggaagacaaagaaggtctgttcgacgcgctcgatacctggctggactgcctgcatatggcggcgctggtgctggacggcattcaggtgaaacgtccacgttgccaggaagcggctcagcagggttacgccaacgccaccgaactggcggattatctggtggcgaaaggcgtaccgttccgcgaggcgcaccatattgttggtgaagcggtggtggaagccattcgtcagggcaaaccgctggaagatctgccgctcagtgagttgcagaaattcagtcaggtgattgacgaagatgtctatccgattctgagcctgcaaagctgcctcgacaagcgtgcggcaaaaggcggcgtcagtccgcagcaggtggcgcaggcgattgcttttgcgcaggctcggttagggtaagaacatttatatgtataaatttgagcctggcttatcgccgggcttttttatggcaaaaaaaagcggatcctggagatccgcaaaagttcacgttggctttagttattcgagttgagaaactctcgaaacgggcagtgacttcaagggttaaaagaggtgccgctccgtttctgtgagcaattatcagtcagaatgcttgatagggataatcgttcattgctattctacctatcgccatgaactatcgtggcgatggaggatggataatgaatattcgtgatcttgagtacctggtggcattggctgaacaccgccattttcggcgtgcggcagattcctgccacgttagccagccgacgcttagcgggcaaattcgtaagctggaagatgagctgggcgtgatgttgctggagcggaccagccgtaaagtgttgttcacccaggcgggaatgctgctggtggatcaggcgcgtaccgtgctgcgtgaggtgaaagtccttaaagagatggcaagccagcagggcgagacgatgtccggaccgctgcacattggtttgattcccacagttggaccgtacctgctaccgcatattatccctatgctgcaccagacctttccaaagctggaaatgtatctgcatgaagcacagacccaccagttactggcgcaactggacagcggcaaactcgattgcgtgatcctcgcgctggtgaaagagagcgaagcattcattgaagtgccgttgtttgatgagccaatgttgctggctatctatgaagatcacccgtgggcgaaccgcgaatgcgtaccgatggccgatctggcaggggaaaaactgctgatgctggaagatggtcactgtttgcgcgatcaggcaatgggtttctgttttgaagccggggcggatgaagatacacacttccgcgcgaccagcctggaaactctgcgcaacatggtggcggcaggtagcgggatcactttactgccagcgctggctgtgccgccggagcgcaaacgcgatggggttgtttatctgccgtgcattaagccggaaccacgccgcactattggcctggtttatcgtcctggcagtccgctgcgcagccgctatgagcagctggcagaggccatccgcgcaagaatggatggccatttcgataaagttttaaaacaggcggtttaaaccgtttaacgcagctacccgataggcttccgccatcgtcgggtagttaaaggtggtgttgacgaagtactcaatagtgttgccgccacctttctgttccataatcgcctgaccgatatgaataatttcggcagcgcgctcgccaaagcagtgaatacccagaatctcttttgtttcccgatggaacaaaattttcagcgtgcccacgttcatgccgacgatttgtgcgcgtgccagatgtttaaactgggcgcggcccacttcatatggcactttcattgcggtcagctgctgttcggttttgcccacagagctgatttccgggatggtgtaaataccggtagggatatcttcaatcagatgtgcggtggcttcgccttttaccagcgcctgcgcggcaatgcgcccctggtcataggccgcgctcgccaggctcggataaccaatcacgtcgcccaccgcgtaaacgtgtggctgtgcggtctgatacatgctgttgaccttcagctgtccgcggctgtcagtttctagcccaatgttctgtaacgccaggctatcggtattaccggtgcgaccgttggcatagagcaggcagtcagctttcagttttttaccgctcttcagatgcatgatcacaccatcgtcacagccttcgatcttctcgtactcttcgttgtgacgaatcactacgccactgttccagaagtgataggagagagaatcactcatctcttgatcgagaaatgccagcaggcgatcgcgggtgttgatcagatccacttttacatccataccgcggaagatgctcgcatattcacagccgatcactccagcaccatagataagtacatggcgcggttcgtggtgcatgctgagaatactgtcgctgtcgtaaatgcgtggatgggtgaaatcaacatctgttggatgatatggacgagagccgcaggcaataacaaatttttcagcggttagtgtttcaacgctgccgtccgggcaatccagcgccaacgtatgctcgtcaacaaagcgagcgtttccctgcaatatttcacagtgattacgttcgtaaaatccctgacgcatgcgcgtttgttgattaatcacgttatcggcatggttaaggatatcggcaaaagaagagcggagcagtcgggaatggtcgctgtaaagtgggttttgattgaattctataatgcggctgacggcgtgacggagagctttgctcgggatggtgccccagtgggtgcaaccgccgccaacattttgataacgctcgataactgcgacgcgcgcaccttgcttaaccaggcccattgcagcgccttcgccgccggggccggaacctattactatggcatcgtaatcgtaggaatgtggcatggtagggcttacctgttcttatacataaaagcaacagaatggtaacattttatcgcgggtaagccaattgatccccgtcatttatctggctatatcctgagcggcctttgctttgtctgtttcttacttttgccctgacgttttattggatttttatcgacgatactctccgtttaagcggcaggtttccgctgtacgtaaaagaaccggccaaagaattgcagtaaatatgttttattgcgttaccgttcattcacaatactggagcaatccagtatgttcattctctggtatagtgccagcagtacttttggcaaggatagtgacatcgtgatgggcgtaagagcgcaacaaaaagaaaaaacccgccgtagcctggtggaagccgcatttagccaattaagtgctgaacgcagcttcgccagcctgagtttgcgtgaagtggcgcgtgaagcgggcattgctcccacctctttttatcggcatttccgcgacgtagacgaactgggtctgaccatggttgatgagagcggtttaatgctacgccaactcatgcgccaggcgcgtcagcgtatcgccaaaggcgggagtgtgatccgcaccagcgtctccacatttatggagttcatcggtaataatcctaacgccttccggttattattgcgggaacgctccggcacctccgctgcgtttcgtgccgccgttgcgcgtgaaattcagcacttcattgcggaacttgcggactatctggaactcgaaaaccatatgccgcgtgcgtttactgaagcgcaagccgaagcaatggtgacaattgtcttcagtgcgggtgccgaggcgttggacgtcggcgtcgaacaacgtcggcaattagaagagcgactggtactgcaactgcgaatgattagcaaaggggcttattactggtatcgccgtgaacaagagaaaaccgcaattattccgggaaatgtgaaggacgagtaatgaaacaagcaaatcaagatagaggtacgctgctgctggcgttagttgctggcttaagcattaatggtactttcgcagcgctgtttagctccattgtgccattttctgtattcccgattatttccctggtgctgacggtttactgcctgcatcaacgttatcttaatcgcactatgccggtaggcttgccgggtctggcagctgcctgttttattctcggcgtactgctgtacagcacggtagttcgtgcggaatatccggatatcggctctaacttcttcccggcagtactctccgtcattatggtgttctggattggcgcgaagatgcgtaaccgtaagcaggaagttgctgagtaatcggtattatgccggatgctggcgcatccggcatgggttttacttcgcggtcagtaatacgccgcactccatatggtgcgtgtaggggaactgatcaaacagagccagacgttcgaccttgtgcgtctggcttaatgtttccagattcttgcataacgtttccgggttacaggagatgtacaaaatacgcggatacgcctgcaccattttctcggtttcactgtccagaccgctgcgcggagggtcgacaaaaatggtttcgcactgataactctttaagtcgatcccttgcaggcggttaaactcgcgcacaccattcatcgcctgagtaaattcttctgccgccatacgaataatttgtacgttatcaatatggttagctgcgatgttgtattgcgcagcagcaacgctcggcttagcgatttcggtggctaatacccgatcaaaattacgcgccagcgctaaactaaagttaccgttgccgcagtacagctccagtaaatcgcctttactgcctttggttacgtccagcgcccattccagcatctgaatattcatcgccgcgttcggctgggtaaagctgttttctacctgacggtagatcatctctttccctgcgaccggcagacgttcatcgatgtaatcctgatccagctcgattttggttttcgttgcccgaccaatcagatgcacattcagattctgcgcgcgcagtgcatcgcgcagggcctccgcttcctgacgccactcatcatccagcttcttatggtatagcagggaaaccaccgcctgattactcagtgtagtgaggtaatcaatctggaacaacttgtggcgcagaacgggattattacgcacacccgcaatcatcgccgtcatcaactggttgataagttcactggcggcggggaagctatccacgcggatgcggcttttggtttgttgatcgaaaatgatgtgatacaggtcatcgccatcgtgccagatgcggaactccgcgcgcatccggtaatgactgaccgggctgcgaaacacttccggaaccaggtcagaaaacggtgccatcatactttgcaaacgtaccactttttcggctaactgcgcttcatactgttctgttggaaggtgttcgggggtcatgatgtatcctgaaaaattaaagtacgcggcgattgtagggattgctcatcagatgtccagatcttgatgaattcctatttgtgagctacgtctggacagtaacttgttacaacctgtagcatccacttgccggtcctgtgagttaatagggaatccagtgcgaatctggagctgacgcgcagcggtaaggaaaggtgcgatgattgcgttatgcggacactgccattcggtgggaagtcatcatctcttagtatcttagatacccctccaagcccgaagacctgccggccaacgtcgcatctggttctcatcatcgcgtaatattgatgaaacctgcggcatccttcttctattgtggatgctttacaatgattaaaaaagctagcctgctgacggcgtgttccgtcacggcattttccgcttgggcacaggataccagcccggatactctcgtcgttactgctaaccgttttgaacagccgcgcagcactgtgcttgcaccaaccaccgttgtgacccgtcaggatatcgaccgctggcagagcaccagcgtcaatgatgtgctgcgccgtcttccgggcgtcgatatcacccaaaacggcggtagtggtcagctcagttctatttttattcgcggtacaaatgccagtcatgtgttggtgttaattgatggcgtacgcctgaatctggcgggggtgagtggttctgccgaccttagccagttccctattgcgcttgtccagcgtgttgaatatatccgtgggccgcgctccgctgtttatggttccgatgcaataggcggggtggtgaatatcatcacgacgcgcgatgaacccggaacggaaattagtgcagggtggggaagcaatagttatcagaactatgatgtctctacgcagcaacaactgggggataagacacgggtaacgctgttgggcgattatgcccatactcatggttatgatgttgttgcctatggtaataccggaacgcaagcgcagacagataacgatggttttttaagtaaaacgctttatggcgcgctggagcataactttactgatgcctggagcggctttgtgcgcggctatggctatgataaccgtaccaattatgacgcgtattattctcccggtagtccgttgctcgatacccgtaaactctatagccaaagttgggacgccgggctgcgctataacggcgaactgattaaaagtcaactcattaccagctatagccatagcaaagattacaactacgatccccattatggtcgttatgatagcagcgcgacgctcgatgagatgaagcaatacaccgtccagtgggcaaacaatgtcatcgttggtcacggtagtattggtgcgggtgtcgactggcagaaacagactacgacgccgggtacaggttatgttgaggatggatatgatcaacgtaataccggcatctatctgaccgggctgcaacaagtcggcgattttacctttgaaggcgcagcacgcagtgacgataacagtcagtttggtcgtcatggaacctggcaaaccagcgccggttgggaattcatcgaaggttatcgcttcattgcttcctacgggacatcttataaggcaccaaatctggggcaactgtatggcttctacggaaatccgaatctggacccggagaaaagcaaacagtgggaaggcgcgtttgaaggcttaaccgctggggtgaactggcgtatttccggatatcgtaacgatgtcagtgacttgatcgattatgatgatcacaccctgaaatattacaacgaagggaaagcgcggattaagggcgtcgaggcgaccgccaattttgataccggaccactgacgcatactgtgagttatgattatgtcgatgcgcgcaatgcgattaccgacacgccgttgttacgccgtgctaaacagcaggtgaaataccagctcgactggcagttgtatgacttcgactggggtattacttatcagtatttaggcactcgctatgataaggattacagttcttatccttatcaaaccgttaaaatgggcggtgtgagcttgtgggatcttgcggttgcgtatccggtcacctctcacctgacagttcgtggtaaaatagccaacctgttcgacaaagattatgagacagtctatggctaccaaactgcaggacgggaatacaccttgtctggcagctacaccttctgaaccacgtcccaccgtgctggtgtttgactccggcgtcggtgggttgagcgtctatgacgagatccggcatctcttaccggatctccattacatttatgctttcgataacgtcgctttcccgtatggcgaaaaaagcgaagcgtttattgttgagcgagtggtggcaattgtcaccgcggtgcaagaacgttatccccttgcgctggctgtggtcgcttgcaacactgccagtaccgttagtcttcctgcattacgcgaaaagttcgacttcccggttgttggtgtcgtgccggcgattaaacctgctgcacgtctgacggcaaatggcattgtcggattactggcaacccgcggaacagttaaacgttcttatactcatgagctgatcgcgcgtttcgctaatgaatgccagatagaaatgctgggcagcgcagagatggttgagttggctgaagcgaagctacatggcgaagatgtttctctggatgcactaaaacgtatcctacgcccgtggttaagaatgaaagagccgccagataccgttgtattgggttgcacccatttccctctactacaagaagaactgttacaagtgctgccagagggaacccggctggtggattctggcgcagcgattgctcgccgaacggcctggttgttagaacatgaagccccggatgcaaaatctgccgatgcgaatattgccttttgtatggcaatgacgccaggagctgaacaattattgcccgttttacagcgttacggcttcgaaacgctcgaaaaactggcagttttaggctgatttggttgaatgttgcgcggtcagaaaattattttaaatttcctcttgtcaggccggaataactccctataatgcgccaccactgacacggaacaacggcaaacacgccgccgggtcagcggggttctcctgagaactccggcagagaaagcaaaaataaatgcttgactctgtagcgggaaggcgtattatgcacaccccgcgccgctgagaaaaagcgaagcggcactgctctttaacaatttatcagacaatctgtgtgggcactcgaagatacggattcttaacgtcgcaagacgaaaaatgaataccaagtctcaagagtgaacacgtaattcattacgaagtttaattctttgagcgtcaaacttttaaattgaagagtttgatcatggctcagattgaacgctggcggcaggcctaacacatgcaagtcgaacggtaacaggaagaagcttgcttctttgctgacgagtggcggacgggtgagtaatgtctgggaaactgcctgatggagggggataactactggaaacggtagctaataccgcataacgtcgcaagaccaaagagggggaccttcgggcctcttgccatcggatgtgcccagatgggattagctagtaggtggggtaacggctcacctaggcgacgatccctagctggtctgagaggatgaccagccacactggaactgagacacggtccagactcctacgggaggcagcagtggggaatattgcacaatgggcgcaagcctgatgcagccatgccgcgtgtatgaagaaggccttcgggttgtaaagtactttcagcggggaggaagggagtaaagttaatacctttgctcattgacgttacccgcagaagaagcaccggctaactccgtgccagcagccgcggtaatacggagggtgcaagcgttaatcggaattactgggcgtaaagcgcacgcaggcggtttgttaagtcagatgtgaaatccccgggctcaacctgggaactgcatctgatactggcaagcttgagtctcgtagaggggggtagaattccaggtgtagcggtgaaatgcgtagagatctggaggaataccggtggcgaaggcggccccctggacgaagactgacgctcaggtgcgaaagcgtggggagcaaacaggattagataccctggtagtccacgccgtaaacgatgtcgacttggaggttgtgcccttgaggcgtggcttccggagctaacgcgttaagtcgaccgcctggggagtacggccgcaaggttaaaactcaaatgaattgacgggggcccgcacaagcggtggagcatgtggtttaattcgatgcaacgcgaagaaccttacctggtcttgacatccacggaagttttcagagatgagaatgtgccttcgggaaccgtgagacaggtgctgcatggctgtcgtcagctcgtgttgtgaaatgttgggttaagtcccgcaacgagcgcaacccttatcctttgttgccagcggtccggccgggaactcaaaggagactgccagtgataaactggaggaaggtggggatgacgtcaagtcatcatggcccttacgaccagggctacacacgtgctacaatggcgcatacaaagagaagcgacctcgcgagagcaagcggacctcataaagtgcgtcgtagtccggattggagtctgcaactcgactccatgaagtcggaatcgctagtaatcgtggatcagaatgccacggtgaatacgttcccgggccttgtacacaccgcccgtcacaccatgggagtgggttgcaaaagaagtaggtagcttaaccttcgggagggcgcttaccactttgtgattcatgactggggtgaagtcgtaacaaggtaaccgtaggggaacctgcggttggatcacctccttaccttaaagaagcgtactttgtagtgctcacacagattgtctgatagaaagtgaaaagcaaggcgtttacgcgttgggagtgaggctgaagagaataaggccgttcgctttctattaatgaaagctcaccctacacgaaaatatcacgcaacgcgtgataagcaattttcgtgtccccttcgtctagaggcccaggacaccgccctttcacggcggtaacaggggttcgaatcccctaggggacgccacttgctggtttgtgagtgaaagtcgccgaccttaatatctcaaaactcatcttcgggtgatgtttgagatatttgctctttaaaaatctggatcaagctgaaaattgaaacactgaacaacgagagttgttcgtgagtctctcaaattttcgcaacacgatgatgaatcgaaagaaacatcttcgggttgtgaggttaagcgactaagcgtacacggtggatgccctggcagtcagaggcgatgaaggacgtgctaatctgcgataagcgtcggtaaggtgatatgaaccgttataaccggcgatttccgaatggggaaacccagtgtgtttcgacacactatcattaactgaatccataggttaatgaggcgaaccgggggaactgaaacatctaagtaccccgaggaaaagaaatcaaccgagattcccccagtagcggcgagcgaacggggagcagcccagagcctgaatcagtgtgtgtgttagtggaagcgtctggaaaggcgcgcgatacagggtgacagccccgtacacaaaaatgcacatgctgtgagctcgatgagtagggcgggacacgtggtatcctgtctgaatatggggggaccatcctccaaggctaaatactcctgactgaccgatagtgaaccagtaccgtgagggaaaggcgaaaagaaccccggcgaggggagtgaaaaagaacctgaaaccgtgtacgtacaagcagtgggagcacgcttaggcgtgtgactgcgtaccttttgtataatgggtcagcgacttatattctgtagcaaggttaaccgaataggggagccgaagggaaaccgagtcttaactgggcgttaagttgcagggtatagacccgaaacccggtgatctagccatgggcaggttgaaggttgggtaacactaactggaggaccgaaccgactaatgttgaaaaattagcggatgacttgtggctgggggtgaaaggccaatcaaaccgggagatagctggttctccccgaaagctatttaggtagcgcctcgtgaattcatctccgggggtagagcactgtttcggcaagggggtcatcccgacttaccaacccgatgcaaactgcgaataccggagaatgttatcacgggagacacacggcgggtgctaacgtccgtcgtgaagagggaaacaacccagaccgccagctaaggtcccaaagtcatggttaagtgggaaacgatgtgggaaggcccagacagccaggatgttggcttagaagcagccatcatttaaagaaagcgtaatagctcactggtcgagtcggcctgcgcggaagatgtaacggggctaaaccatgcaccgaagctgcggcagcgacgcttatgcgttgttgggtaggggagcgttctgtaagcctgcgaaggtgtgctgtgaggcatgctggaggtatcagaagtgcgaatgctgacataagtaacgataaagcgggtgaaaagcccgctcgccggaagaccaagggttcctgtccaacgttaatcggggcagggtgagtcgacccctaaggcgaggccgaaaggcgtagtcgatgggaaacaggttaatattcctgtacttggtgttactgcgaaggggggacggagaaggctatgttggccgggcgacggttgtcccggtttaagcgtgtaggctggttttccaggcaaatccggaaaatcaaggctgaggcgtgatgacgaggcactacggtgctgaagcaacaaatgccctgcttccaggaaaagcctctaagcatcaggtaacatcaaatcgtaccccaaaccgacacaggtggtcaggtagagaataccaaggcgcttgagagaactcgggtgaaggaactaggcaaaatggtgccgtaacttcgggagaaggcacgctgatatgtaggtgaggtccctcgcggatggagctgaaatcagtcgaagataccagctggctgcaactgtttattaaaaacacagcactgtgcaaacacgaaagtggacgtatacggtgtgacgcctgcccggtgccggaaggttaattgatggggttagcgcaagcgaagctcttgatcgaagccccggtaaacggcggccgtaactataacggtcctaaggtagcgaaattccttgtcgggtaagttccgacctgcacgaatggcgtaatgatggccaggctgtctccacccgagactcagtgaaattgaactcgctgtgaagatgcagtgtacccgcggcaagacggaaagaccccgtgaacctttactatagcttgacactgaacattgagccttgatgtgtaggataggtgggaggctttgaagtgtggacgccagtctgcatggagccgaccttgaaataccaccctttaatgtttgatgttctaacgttgacccgtaatccgggttgcggacagtgtctggtgggtagtttgactggggcggtctcctcctaaagagtaacggaggagcacgaaggttggctaatcctggtcggacatcaggaggttagtgcaatggcataagccagcttgactgcgagcgtgacggcgcgagcaggtgcgaaagcaggtcatagtgatccggtggttctgaatggaagggccatcgctcaacggataaaaggtactccggggataacaggctgataccgcccaagagttcatatcgacggcggtgtttggcacctcgatgtcggctcatcacatcctggggctgaagtaggtcccaagggtatggctgttcgccatttaaagtggtacgcgagctgggtttagaacgtcgtgagacagttcggtccctatctgccgtgggcgctggagaactgaggggggctgctcctagtacgagaggaccggagtggacgcatcactggtgttcgggttgtcatgccaatggcactgcccggtagctaaatgcggaagagataagtgctgaaagcatctaagcacgaaacttgccccgagatgagttctccctgaccctttaagggtcctgaaggaacgttgaagacgacgacgttgataggccgggtgtgtaagcgcagcgatgcgttgagctaaccggtactaatgaaccgtgaggcttaaccttacaacgccgaagctgttttggcggatgagagaagattttcagcctgatacagattaaatcagaacgcagaagcggtctgataaaacagaatttgcctggcggcagtagcgcggtggtcccacctgaccccatgccgaactcagaagtgaaacgccgtagcgccgatggtagtgtggggtctccccatgcgagagtagggaactgccaggcatcaaataaaacgaaaggctcagtcgaaagactgggcctttcgttttatctgttgtttgtcggtgaacgctctcctgagtaggacaaatccgccgggagcggatttgaacgttgcgaagcaacggcccggagggtggcgggcaggacgcccgccataaactgccaggcatcaaattaagcagaaggccatcctgacggatggcctttttgcgtttctacaaactcttcctgtcgtcatatctacaagccatccccccacagatacggtaaactagcctcgtttttgcatcaggaaagcagctatgaaccactccttaaaaccctggaacacatttggcattgatcataatgctcagcacattgtatgtgccgaagacgaacaacaattactcaatgcctggcagtatgcaaccgcagaaggacaacccgttcttattctgggtgaaggaagtaatgtactttttctggaggactatcgcggcacggtgatcatcaaccggatcaaaggtatcgaaattcatgatgaacctgatgcgtggtatttacatgtaggagccggagaaaactggcatcgtctggtaaaatacactttgcaggaaggtatgcctggtctggaaaatctggcattaattcctggttgtgtcggcagtagtcctatccagaatattggtgcttatggcgtagaattacagcgagtttgcgcttatgttgattctgttgaactggcgacaggcaagcaagtgcgcttaactgccaaagagtgccgttttggctatcgcgacagtatttttaaacatgaataccaggaccgcttcgctattgtagccgtaggtctgcgtctgccaaaagagtggcaacctgtactaacgtatggtgacttaactcgtctggatcctacaacagtaacgccacagcaagtatttaatgcggtgtgtcatatgcgcaccaccaaactccctgatccaaaagtgaatggcaatgccggtagtttcttcaaaaaccctgttgtatctgccgaaacggctaaagcattactgagtcaatttccaacagcaccaaattacccccaggcggatggtagtgtaaaactggcagcaggttggcttatcgatcagtgccagctaaaagggatgcaaataggtggggctgcggtgcaccgtcaacaggcgttagttctcattaatgaagacaatgcaaaaagcgaagatgttgtacagctggcgcatcatgtaagacagaaagttggtgaaaaatttaatgtctggcttgagcctgaagtccgctttattggtgcaagtggtgaagtgagcgcagtggagacaattagttgaaataaagcgcagtggagacaatttcatgaaggataacaccgtgccactgaaattgattgccctgttagcgaacggtgaatttcactctggcgagcagttgggtgaaacgctgggaatgagccgggcggctattaataaacacattcagacactgcgtgactggggcgttgatgtctttaccgttccgggtaaaggatacagcctgcctgagcctatccagttacttaatgctaaacagatattgggtcagctggatggcggtagtgtagccgtgctgccagtgattgactccacgaatcagtaccttcttgatcgtatcggagagcttaaaagcggcgatgcttgcattgcagaataccagcaggctggccgtggtcgccggggtcggaaatggtttagcccttttggcgcaaacttatatttgagcatgttctggcgtctggaacaaggcccggcggcggcgattggtttaagtctggttatcggtatcgtgatggcggaagtattacgcaagctgggtgcagataaagttcgtgttaaatggcctaatgacctctatctgcaggatcgcaagctggcaggcattctggtggagctgactggcaaaactggcgatgcggcgcaaatagtcattggagccgggatcaacatggcaatgcgccgtgttgaagagagtgtcgttaatcaggggtggatcacgctgcaggaagcggggatcaatctcgatcgtaatacgttggcggccatgctaatacgtgaattacgtgctgcgttggaactcttcgaacaagaaggattggcaccttatctgagccgctgggaaaagctggataattttattaatcgcccagtgaaacttatcattggtgataaagaaatatttggcattagtcgcggaatagacaaacagggggctttattacttgagcaggatggaataataaaaccctggatgggcggtgaaatatccctgcgtagtgcagaaaaataagaaaggggagtattcgctcccctgcaaattatttgcgtagtctgacctcttctaccgcatgattagcacttttcgtcaggattaaactggcgcgctcacgagtaggtagaatattttgctttaagttcagccagttgatctctttccacaatgtcatggcagtcttaatcgcttcttctttagttaatttcgcgtagttatgaaaataggaatccgggtcggtaaaagccccttcgcggaatttcagaaaacggttgatataccatgtctgaagtaagtcttccggtgcatcaacatatatgctaaaatcgacaaaatcagaaacaaatacatgatgtggatcgtgtggataatccatcccgctctgtaagacatttaacccttcaagaattaaaatatcaggctgaacaaccgttttatctccatccgggatcacatcataaataagatgactgtaaacaggtgctgtaacgtttggcacgccggatttgagatcggaaacaaacttcaccaggcgatgcatatcatagctttccgggaagcctttcttcttcatcagaccacgttctttcagaacctgattagggtgaaggaagccatctgtagtgatcagttcaacacgacgatgttccggccaacggcttaatagcgcctgcaatacacgggcggttgtacttttccccaccgcgacactgccagcaatactgataatgtaaggaatgcgttgcccgttggtaccaagaaactgttccagaactgcctgacggcgcagattgctgcttatatagaagttcagcaaacgactcaaaggtaaatagatctcggcaacttcttctaagctgagatcttcattaatacctttgagacgggcgatctcatcttcgcttaacgtcataggtacggaatcacgcagagctgcccactggttgcggtcaaactgtaggtaaggcgtcattaacgtttgctcttttatactcataagcatgtttctggcggtcatagctctatcggcaaagcgatatttgccatggcgcgtcacagttctgttgaatgggttaatgggcaggagggtaacaccagatggggaggaataataagaaaaaatctctgccaggaagctatcgttgaaaagcaatgtgacagatattccatctgataaaaagaattatggtttagcaggagcgcattgttgagcacaatgatgttgaaaaagtgtgctaatctgccctccgttcggctgtttcttcatcgtgtcgcataaaatgtgaccaataaaacaaattatgcaattttttagttgcatgaactcgcatgtctccatagaatgcgcgctacttgatgccgacttagctcagtaggtagagcaactgacttgtaatcagtaggtcaccagttcgattccggtagtcggcaccatcaagtccggtggggttcccgagcggccaaagggagcagactgtaaatctgccgtcacagacttcgaaggttcgaatccttcccccaccaccaatttcggccacgcgatggcgtagcccgagacgataagttcgcttaccggctcgaataaagagagcttctctcgatattcagtgcagaatgaaaatcaggtagccgagttccaggatgcgggcatcgtataatggctattacctcagccttccaagctgatgatgcgggttcgattcccgctgcccgctccaagatgtgctgatatagctcagttggtagagcgcacccttggtaagggtgaggtcggcagttcgaatctgcctatcagcaccacttcttttctcctccctgttttttccttctgtttattgcattcaacaagtcgggcatgttgcctggttgatgtggtgatatcaccgatttatccgtgtcttagagggacaatcgatgtctaaagaaaagtttgaacgtacaaaaccgcacgttaacgtcggtactatcggccacgttgaccatggtaaaacaacgctgaccgctgcaatcactaccgtactggctaaaacctacggcggtgctgctcgcgcattcgaccagatcgataacgcgccggaagaaaaagctcgtggtatcaccatcaacacttctcacgttgaatacgacaccccgacccgtcactacgcacacgtagactgcccggggcacgccgactatgttaaaaacatgatcaccggtgctgcgcagatggacggcgcgatcctggtagttgctgcgactgacggcccgatgccgcagactcgtgagcacatcctgctgggtcgtcaggtaggcgttccgtacatcatcgtgttcctgaacaaatgcgacatggttgatgacgaagagctgctggaactggttgaaatggaagttcgtgaacttctgtctcagtacgacttcccgggcgacgacactccgatcgttcgtggttctgctctgaaagcgctggaaggcgacgcagagtgggaagcgaaaatcctggaactggctggcttcctggattcttacattccggaaccagagcgtgcgattgacaagccgttcctgctgccgatcgaagacgtattctccatctccggtcgtggtaccgttgttaccggtcgtgtagaacgcggtatcatcaaagttggtgaagaagttgaaatcgttggtatcaaagagactcagaagtctacctgtactggcgttgaaatgttccgcaaactgctggacgaaggccgtgctggtgagaacgtaggtgttctgctgcgtggtatcaaacgtgaagaaatcgaacgtggtcaggtactggctaagccgggcaccatcaagccgcacaccaagttcgaatctgaagtgtacattctgtccaaagatgaaggcggccgtcatactccgttcttcaaaggctaccgtccgcagttctacttccgtactactgacgtgactggtaccatcgaactgccggaaggcgtagagatggtaatgccgggcgacaacatcaaaatggttgttaccctgatccacccgatcgcgatggacgacggtctgcgtttcgcaatccgtgaaggcggccgtaccgttggcgcgggcgttgtagcaaaagttctgagctaattgccgataacatttgacgcaatgcgcactaaaagggcatcatttgatgccctttttgcacgctttcgtaccagaacctggctcatcagtgattttctttgtcataatcattgctgagacaggctctgttgagggcgtataatccgaaaagctaatacgcgtttcgatttggtttgcctcgcgatcgcggggtgaaaatgtttgtagaaaacttctgacaggttggtttatgagtgcgaataccgaagctcaaggaagcgggcgcggcctggaagcgatgaagtgggtcgttgtggtggcattgctcctggtggcgattgtcggcaactatctttatcgcgacattatgctgccgctgcgtgcgctggccgtagtaattctgattgctgcagcgggtggtgtcgcgctgttaacgacaaaaggtaaagctaccgttgcttttgcccgtgaagcgcgtaccgaagtccgtaaggtcatttggccgactcgccaggaaacattgcacaccacgctgattgtggctgcggttaccgcagtaatgagtctgatcctgtggggactggatggtattctggttcgcctggtatcctttatcactggcctgaggttctgagatgtctgaagctcctaaaaagcgctggtacgtcgttcaggcgttttccggttttgaaggccgcgtagcaacgagcctgcgtgagcatatcaaattacacaacatggaagatttgtttggtgaagtcatggtaccaaccgaagaagtggttgaaatccgtggcggtcagcgtcgcaaaagcgaacgtaaattcttccctggctacgtcctcgttcagatggtgatgaacgacgcgagctggcacctggtgcgcagcgtaccgcgtgtgatgggcttcatcggcggtacttccgatcgtcctgcgccaatcagcgataaagaagtcgatgcgattatgaaccgcctgcagcaggttggtgataagccgcgtccgaaaacgctgtttgaaccgggtgaaatggtccgtgttaatgatggtccgttcgctgacttcaacggtgttgttgaagaagtggattacgagaaatctcgtctgaaagtgtctgtttctatcttcggtcgtgcgaccccggtagagctggacttcagccaggttgaaaaagcctaacccagcgatcaaaaaagcggcgatttaatcgttgcacaaggcgtgagattggaatacaatttcgcgccttttgtttttatgggccttgcccgtaaaacgattttttatatcacggggagcctctcagaggcgttattacccaacttgaggaatttataatggctaagaaagtacaagcctatgtcaagctgcaggttgcagctggtatggctaacccgagtccgccagtaggtccggctctgggtcagcagggcgtaaacatcatggaattctgcaaagcgttcaacgcaaaaactgattccatcgaaaaaggtctgccgattccggtagtaatcaccgtttacgctgaccgttctttcactttcgttaccaagaccccgccggcagcagttctgctgaaaaaagcggctggtatcaagtctggttccggtaagccgaacaaagacaaagtgggtaaaatttcccgcgctcagctgcaggaaatcgcgcagaccaaagctgccgacatgactggtgccgacattgaagcgatgactcgctccatcgaaggtactgcacgttccatgggcctggtagtggaggactaagaaatggctaaactgaccaagcgcatgcgtgttatccgcgagaaagttgatgcaaccaaacagtacgacatcaacgaagctatcgcactgctgaaagagctggcgactgctaaattcgtagaaagcgtggacgtagctgttaacctcggcatcgacgctcgtaaatctgaccagaacgtacgtggtgcaactgtactgccgcacggtactggccgttccgttcgcgtagccgtatttacccaaggtgcaaacgctgaagctgctaaagctgcaggcgcagaactggtaggtatggaagatctggctgaccagatcaagaaaggcgaaatgaactttgacgttgttattgcttctccggatgcaatgcgcgttgttggccagctgggccaggttctgggtccgcgcggcctgatgccaaacccgaaagtgggtactgtaacaccgaacgttgctgaagcggttaaaaacgctaaagctggccaggttcgttaccgtaacgacaaaaacggcatcatccacaccaccatcggtaaagtggactttgacgctgacaaactgaaagaaaacctggaagctctgctggttgcgctgaaaaaagcaaaaccgactcaggcgaaaggcgtgtacatcaagaaagttagcatctccaccaccatgggtgcaggtgttgcagttgaccaggctggcctgagcgcttctgtaaactaatgcctttacgtgggcggtgattttgtctacaatcttacccccacgtataatgcttaatgcagacgtatatccgagatattcgggttgtggcaaggcggcaactgagtgagtcgccaggagcatagctaactatgtgactggtgcgaatgaaggaagccaacgccgtcacaagctgaatagcgacggatagaaaagatttgttcgttggagcctggcctatccaggcctccgtcgaagaccgcaggagtttcgcaagaaacttaatcccctgcgtagacggtgacagaacgctaagattattcttttatattctggcttgtttctgctcaccgtaattaagacgctctctccgtttggaggagtgaagtgagttccagagattttctctggcaaacatccaggagcaaagctaatggctttaaatcttcaagacaaacaagcgattgttgctgaagtcagcgaagtagccaaaggcgcgctgtctgcagtagttgcggattcccgtggcgtaactgtagataaaatgactgaactgcgtaaagcaggtcgcgaagctggcgtatacatgcgtgttgttcgtaacaccctgctgcgccgtgctgttgaaggtactccgttcgagtgcctgaaagacgcgtttgttggtccgaccctgattgcatactctatggaacacccgggcgctgctgctcgtctgttcaaagagttcgcgaaagcgaatgcaaaatttgaggtcaaagccgctgcctttgaaggtgagctgatcccggcgtctcagatcgaccgcctggcaactctgccgacctacgaagaagcaattgcacgcctgatggcaaccatgaaagaagctagcgctggcaaactggttcgtactctggctgctgtacgcgatgcgaaagaagctgcttaatcgcagttatctttttaacgcattcgcttacgtataaacttattctgatattcaggaacaatttaaatgtctatcactaaagatcaaatcattgaagcagttgcagctatgtctgtaatggacgttgtagaactgatctctgcaatggaagaaaaattcggtgtttccgctgctgctgctgtagctgtagctgctggcccggttgaagctgctgaagaaaaaactgaattcgacgtaattctgaaagctgctggcgctaacaaagttgctgttatcaaagcagtacgtggcgcaactggcctgggtctgaaagaagctaaagacctggtagaatctgcaccggctgctctgaaagaaggcgtgagcaaagacgacgcagaagcactgaaaaaagctctggaagaagctggcgctgaagttgaagttaaataagccaacccttccggttgcagcctgagaaatcaggctgatggctggtgactttttagtcaccagcctttttgcgctgtaaggcgccagtagcgtttcacactgtttgactactgctgtgcctttcaatgcttgtttctatcgacgacttaatatactgcgacaggacgtccgttctgtgtaaatcgcaatgaaatggtttaagcgtgatagcaacaggcattgcggaaagtgttccattttccggtcaacaaaatagtgttgcacaaactgtccgctcaatggacagatgggtcgacttgtcagcgagctgaggaaccctatggtttactcctataccgagaaaaaacgtattcgtaaggattttggtaaacgtccacaagttctggatgtaccttatctcctttctatccagcttgacagctttcagaaatttatcgagcaagatcctgaagggcagtatggtctggaagctgctttccgttccgtattcccgattcagagctacagcggtaattccgagctgcaatacgtcagctaccgccttggcgaaccggtgtttgacgtccaggaatgtcaaatccgtggcgtgacctattccgcaccgctgcgcgttaaactgcgtctggtgatctatgagcgcgaagcgccggaaggcaccgtaaaagacattaaagaacaagaagtctacatgggcgaaattccgctcatgacagacaacggtacctttgttatcaacggtactgagcgtgttatcgtttcccagctgcaccgtagtccgggcgtcttctttgactccgacaaaggtaaaacccactctagcggtaaagtgctgtataacgcgcgtatcatcccttaccgtggttcctggctggacttcgaattcgatccgaaggacaacctgttcgtacgtatcgaccgtcgccgtaaactgcctgcgaccatcattctgcgcgccctgaactacaccacagagcagatcctcgacctgttctttgaaaaagttatctttgaaatccgtgataacaagctgcagatggaactggtgccggaacgcctgcgtggtgaaaccgcatcttttgacatcgaagctaacggtaaagtgtacgtagaaaaaggccgccgtatcactgcgcgccacattcgccagctggaaaaagacgacgtcaaactgatcgaagtcccggttgagtacatcgcaggtaaagtggttgctaaagactatattgatgagtctaccggcgagctgatctgcgcagcgaacatggagctgagcctggatctgctggctaagctgagccagtctggtcacaagcgtatcgaaacgctgttcaccaacgatctggatcacggcccatatatctctgaaaccttacgtgtcgacccaactaacgaccgtctgagcgcactggtagaaatctaccgcatgatgcgccctggcgagccgccgactcgtgaagcagctgaaagcctgttcgagaacctgttcttctccgaagaccgttatgacttgtctgcggttggtcgtatgaagttcaaccgttctctgctgcgcgaagaaatcgaaggttccggtatcctgagcaaagacgacatcattgatgttatgaaaaagctcatcgatatccgtaacggtaaaggcgaagtcgatgatatcgaccacctcggcaaccgtcgtatccgttccgttggcgaaatggcggaaaaccagttccgcgttggcctggtacgtgtagagcgtgcggtgaaagagcgtctgtctctgggcgatctggataccctgatgccacaggatatgatcaacgccaagccgatttccgcagcagtgaaagagttcttcggttccagccagctgtctcagtttatggaccagaacaacccgctgtctgagattacgcacaaacgtcgtatctccgcactcggcccaggcggtctgacccgtgaacgtgcaggcttcgaagttcgagacgtacacccgactcactacggtcgcgtatgtccaatcgaaacccctgaaggtccgaacatcggtctgatcaactctctgtccgtgtacgcacagactaacgaatacggcttccttgagactccgtatcgtaaagtgaccgacggtgttgtaactgacgaaattcactacctgtctgctatcgaagaaggcaactacgttatcgcccaggcgaactccaacttggatgaagaaggccacttcgtagaagacctggtaacttgccgtagcaaaggcgaatccagcttgttcagccgcgaccaggttgactacatggacgtatccacccagcaggtggtatccgtcggtgcgtccctgatcccgttcctggaacacgatgacgccaaccgtgcattgatgggtgcgaacatgcaacgtcaggccgttccgactctgcgcgctgataagccgctggttggtactggtatggaacgtgctgttgccgttgactccggtgtaactgcggtagctaaacgtggtggtgtcgttcagtacgtggatgcttcccgtatcgttatcaaagttaacgaagacgagatgtatccgggtgaagcaggtatcgacatctacaacctgaccaaatacacccgttctaaccagaacacctgtatcaaccagatgccgtgtgtgtctctgggtgaaccggttgaacgtggcgacgtgctggcagacggtccgtccaccgacctcggtgaactggcgcttggtcagaacatgcgcgtagcgttcatgccgtggaatggttacaacttcgaagactccatcctcgtatccgagcgtgttgttcaggaagaccgtttcaccaccatccacattcaggaactggcgtgtgtgtcccgtgacaccaagctgggtccggaagagatcaccgctgacatcccgaacgtgggtgaagctgcgctctccaaactggatgaatccggtatcgtttacattggtgcggaagtgaccggtggcgacattctggttggtaaggtaacgccgaaaggtgaaactcagctgaccccagaagaaaaactgctgcgtgcgatcttcggtgagaaagcctctgacgttaaagactcttctctgcgcgtaccaaacggtgtatccggtacggttatcgacgttcaggtctttactcgcgatggcgtagaaaaagacaaacgtgcgctggaaatcgaagaaatgcagctcaaacaggcgaagaaagacctgtctgaagaactgcagatcctcgaagcgggtctgttcagccgtatccgtgctgtgctggtagccggtggcgttgaagctgagaagctcgacaaactgccgcgcgatcgctggctggagctgggcctgacagacgaagagaaacaaaatcagctggaacagctggctgagcagtatgacgaactgaaacacgagttcgagaagaaactcgaagcgaaacgccgcaaaatcacccagggcgacgatctggcaccgggcgtgctgaagattgttaaggtatatctggcggttaaacgccgtatccagcctggtgacaagatggcaggtcgtcacggtaacaagggtgtaatttctaagatcaacccgatcgaagatatgccttacgatgaaaacggtacgccggtagacatcgtactgaacccgctgggcgtaccgtctcgtatgaacatcggtcagatcctcgaaacccacctgggtatggctgcgaaaggtatcggcgacaagatcaacgccatgctgaaacagcagcaagaagtcgcgaaactgcgcgaattcatccagcgtgcgtacgatctgggcgctgacgttcgtcagaaagttgacctgagtaccttcagcgatgaagaagttatgcgtctggctgaaaacctgcgcaaaggtatgccaatcgcaacgccggtgttcgacggtgcgaaagaagcagaaattaaagagctgctgaaacttggcgacctgccgacttccggtcagatccgcctgtacgatggtcgcactggtgaacagttcgagcgtccggtaaccgttggttacatgtacatgctgaaactgaaccacctggtcgacgacaagatgcacgcgcgttccaccggttcttacagcctggttactcagcagccgctgggtggtaaggcacagttcggtggtcagcgtttcggggagatggaagtgtgggcgctggaagcatacggcgcagcatacaccctgcaggaaatgctcaccgttaagtctgatgacgtgaacggtcgtaccaagatgtataaaaacatcgtggacggcaaccatcagatggagccgggcatgccagaatccttcaacgtattgttgaaagagattcgtagcctgggtatcaacatcgaactggaagacgagtaattctcgctcaaacaggtcactgctgtcgggttaaaacccggcagcggattgtgctaactccgacgggagcaaatccgtgaaagatttattaaagtttctgaaagcgcagactaaaaccgaagagtttgatgcgatcaaaattgctctggctagcccagacatgatccgtagttggtctttcggtgaagttaaaaagccggaaaccatcaactaccgtacgttcaaaccagaacgtgacggccttttctgcgcccgtatctttgggccggtaaaagattacgagtgcctgtgcggtaagtacaagcgcctgaaacaccgtggcgtcatctgtgagaagtgcggcgttgaagtgacccagactaaagtacgccgtgagcgtatgggccacatcgaactggcttccccgactgcgcacatctggttcctgaaaagcctgccgtcccgtatcggtctgctgctcgatatgccgctgcgcgatatcgaacgcgtactgtactttgaatcctatgtggttatcgaaggcggtatgaccaacctggaacgtcagcagatcctgactgaagagcagtatctggacgcgctggaagagttcggtgacgaattcgacgcgaagatgggggcggaagcaatccaggctctgctgaagagcatggatctggagcaagagtgcgaacagctgcgtgaagagctgaacgaaaccaactccgaaaccaagcgtaaaaagctgaccaagcgtatcaaactgctggaagcgttcgttcagtctggtaacaaaccagagtggatgatcctgaccgttctgccggtactgccgccagatctgcgtccgctggttccgctggatggtggtcgtttcgcgacttctgacctgaacgatctgtatcgtcgcgtcattaaccgtaacaaccgtctgaaacgtctgctggatctggctgcgccggacatcatcgtacgtaacgaaaaacgtatgctgcaggaagcggtagacgccctgctggataacggtcgtcgcggtcgtgcgatcaccggttctaacaagcgtcctctgaaatctttggccgacatgatcaaaggtaaacagggtcgtttccgtcagaacctgctcggtaagcgtgttgactactccggtcgttctgtaatcaccgtaggtccatacctgcgtctgcatcagtgcggtctgccgaagaaaatggcactggagctgttcaaaccgttcatctacggcaagctggaactgcgtggtcttgctaccaccattaaagctgcgaagaaaatggttgagcgcgaagaagctgtcgtttgggatatcctggacgaagttatccgcgaacacccggtactgctgaaccgtgcaccgactctgcaccgtctgggtatccaggcatttgaaccggtactgatcgaaggtaaagctatccagctgcacccgctggtttgtgcggcatataacgccgacttcgatggtgaccagatggctgttcacgtaccgctgacgctggaagcccagctggaagcgcgtgcgctgatgatgtctaccaacaacatcctgtccccggcgaacggcgaaccaatcatcgttccgtctcaggacgttgtactgggtctgtactacatgacccgtgactgtgttaacgccaaaggcgaaggcatggtgctgactggcccgaaagaagcagaacgtctgtatcgctctggtctggcttctctgcatgcgcgcgttaaagtgcgtatcaccgagtatgaaaaagatgctaacggtgaattagtagcgaaaaccagcctgaaagacacgactgttggccgtgccattctgtggatgattgtaccgaaaggtctgccttactccatcgtcaaccaggcgctgggtaaaaaagcaatctccaaaatgctgaacacctgctaccgcattctcggtctgaaaccgaccgttatttttgcggaccagatcatgtacaccggcttcgcctatgcagcgcgttctggtgcatctgttggtatcgatgacatggtcatcccggagaagaaacacgaaatcatctccgaggcagaagcagaagttgctgaaattcaggagcagttccagtctggtctggtaactgcgggcgaacgctacaacaaagttatcgatatctgggctgcggcgaacgatcgtgtatccaaagcgatgatggataacctgcaaactgaaaccgtgattaaccgtgacggtcaggaagagaagcaggtttccttcaacagcatctacatgatggccgactccggtgcgcgtggttctgcggcacagattcgtcagcttgctggtatgcgtggtctgatggcgaagccggatggctccatcatcgaaacgccaatcaccgcgaacttccgtgaaggtctgaacgtactccagtacttcatctccacccacggtgctcgtaaaggtctggcggataccgcactgaaaactgcgaactccggttacctgactcgtcgtctggttgacgtggcgcaggacctggtggttaccgaagacgattgtggtacccatgaaggtatcatgatgactccggttatcgagggtggtgacgttaaagagccgctgcgcgatcgcgtactgggtcgtgtaactgctgaagacgttctgaagccgggtactgctgatatcctcgttccgcgcaacacgctgctgcacgaacagtggtgtgacctgctggaagagaactctgtcgacgcggttaaagtacgttctgttgtatcttgtgacaccgactttggtgtatgtgcgcactgctacggtcgtgacctggcgcgtggccacatcatcaacaagggtgaagcaatcggtgttatcgcggcacagtccatcggtgaaccgggtacacagctgaccatgcgtacgttccacatcggtggtgcggcatctcgtgcggctgctgaatccagcatccaagtgaaaaacaaaggtagcatcaagctcagcaacgtgaagagcgttgtgaactccagcggtaaactggttatcacttcccgtaatactgaactgaaactgatcgacgaattcggtcgtactaaagaaagctacaaagtaccttacggtgcggtactggcgaaaggcgatggcgaacaggttgctggcggcgaaaccgttgcaaactgggacccgcacaccatgccggttatcaccgaagtaagcggttttgtacgctttactgacatgatcgacggccagaccattacgcgtcagaccgacgaactgaccggtctgtctagcctggtggttctggattccgcagaacgtaccgcaggtggtaaagatctgcgtccggcactgaaaatcgttgatgctcagggtaacgacgttctgatcccaggtaccgatatgccagcgcagtacttcctgccgggtaaagcgattgttcagctggaagatggcgtacagatcagctctggtgacaccctggcgcgtattccgcaggaatccggcggtaccaaggacatcaccggtggtctgccgcgcgttgcggacctgttcgaagcacgtcgtccgaaagagccggcaatcctggctgaaatcagcggtatcgtttccttcggtaaagaaaccaaaggtaaacgtcgtctggttatcaccccggtagacggtagcgatccgtacgaagagatgattccgaaatggcgtcagctcaacgtgttcgaaggtgaacgtgtagaacgtggtgacgtaatttccgacggtccggaagcgccgcacgacattctgcgtctgcgtggtgttcatgctgttactcgttacatcgttaacgaagtacaggacgtataccgtctgcagggcgttaagattaacgataaacacatcgaagttatcgttcgtcagatgctgcgtaaagctaccatcgttaacgcgggtagctccgacttcctggaaggcgaacaggttgaatactctcgcgtcaagatcgcaaaccgcgaactggaagcgaacggcaaagtgggtgcaacttactcccgcgatctgctgggtatcaccaaagcgtctctggcaaccgagtccttcatctccgcggcaagcttccaggagaccactcgcgtgctgaccgaagcagccgttgcgggcaaacgcgacgaactgcgcggcctgaaagagaacgttatcgtgggtcgtctgatcccggcaggtaccggttacgcgtaccaccaggatcgtatgcgtcgccgtgctgcgggtgaagctccggctgcaccgcaggtgactgcagaagacgcatctgccagcctggcagaactgctgaacgcaggtctgggcggttctgataacgagtaatcgttaatccgcaaataacgtaaaaacccgcttcggcgggtttttttatggggggagtttagggaaagagcatttgtcagaatatttaaggaatttctgaatactcataatcaatgtagagatgactaatatcctgaaactgactgaactaattgagtcaaactcggcaaggattcgatactattcctgtgtaactttcttaaggaacgagaatgaaacaggaagtggaaaagtggcgaccttttggacatccggatggtgatattcgtgatttaagttttcttgatgctcatcaggctgtctacgttcagcatcatgagggcaaagagcctttagagtatcgcttttgggttacctactctcttcactgcttcacaaaagattatgaacatcagacgaacgaagaaaaacaaagcttaatgtaccacgcgcctaaagaatctcgtcccttctgccagcaccgttataacttagcgcgcacacacttaaaaagaactattttggcgctgccagaaagcaacgttattcatgccgggtatggtagctatgccgtgattgaggtggacttagacggaggagataaggcattttactttgttgcgttcagggctttcagggaaaagaaaaaactccgtttgcatgtaactagcgcttatcccatttctgaaaaacagaaaggtaaaagtgtgaaatttttcaccattgcctacaacttattgagaaataagcagcttcctcagcccagtaaataacaaaacccaccttaaggtgggtttcgccagagaattatctctggtattcagaacgccattaccggactttgccttgaccttgcgataatcgcaggttgcgggatgtctgaatttcttcagtctgctgcatcctggaagatgagaacatgtgttcttattttcgtctctatcatagttgagtatttactctcttacaatcagatctctttcattgctcaacaggcgatggcttcagactttgcattacggaatttttaagaaaggcagggcgaaacgaggaagaagcttttcgccctggacaacattcctgctgacggcactaccataaaaaaacacaacgctttcaacaaccttgcgtttttcatcttccgtagcggctcggaataaatttacgttcttacattccgtctcatagtctttggctggcgcgtcccagatagctgtcccagtctttccataccggctgcaaaccctgagcggttaacgcggcagcaaccgcttccggtctgcgatcgtcgtgcggactgaactgttccaactcggggtgattatcggcatagccacctggctgcgttttgctgaaggcgctgacgttattgatcgccagcggaataacgcgatcgcgaaaccacggactttcccgcgtggagagactcagttcaatctccggtgcaagcagtcggaaggcgcagatggtttgcactaactggcgttcatccataatgctcgcaggctcaatgccgccagtacacgggcgcaggcgcggaaaggagacagagtaacggctttgccagtaatgctgttgcagccatagcaaatgttcggcaaccatatagctgtcaacgcgccagttgtcggaaaggccaattagcgcgccgaggcctatcttatcaatccccgcacgccccagccgatccggcgtttccagccgccagaagaagtcctgttttttgcctttcagatgatggcgggcataagtcgcctcgtgatatgtctcctgataaaccatcacgccatccagaccaagttgctttaactcggcgtattccgtctccgccagcggttgcacttccatctgtagactagagaactgttcacgaagggcagggagatgacgacgaaagtaatccatccccactttcgcctgatgttcaccagtgactaacagcagatgttcaaagcccatctcccgtatagcggcactttccctggcaatatccgcttcatccagcgttttgcgcttgatgcgattactcatggaaaatccacagtacgtgcagtcgttagcgcaaagattggaaagataaagcgggacgtagaaactaactgtgttgccaaatcgctgacgggtcagacgctgcgcccgttgggccagttgttccagatagccactggcggcagggcttaacagcgccatcatgtcgtcgcgggtgagttggctggcatttagcgcccgctctacgtcagcagccgttttgccgttgatacgcaggcggatgtcgtcccagtccagttgtcgccagcgatcgctgaaggttttcatgcgcttgcctccagaaatccggtcagcgggctggtggcatgagcaaaataactgcggctgcccggtccggactgacgtgccagtaggcctgcttctaccgccagacgaaatgccttcgccatgttgacgggatcgtccgcgacggcaatcgccgtattcactaacaccgcgtcggcccccatttccagcgcctgcgcggcatggctgggaacgccgatgccagcatcgacaaccaccggcactgtggcctgctggataataatctccagcatggcgcgggtttccagtccctgattgctgccaatcggcgcgccgagcggcatcaccgctgcacagccgacttcttccagacgtttacacaataccggatcggccccgcagtaaggcagcacgacaaatccctgttgtaccagcgtttcggcggctttcagggtttcgatgggatcgggcaacagccagcgggcgtcagggtgaatctctaattttaaccagtttgtgcctaacgcttcacgagccagatgggcggcgaaaatggcttcttccgctgttttcgccccggatgtatttggcagcagggtcacacccgccgcgataagcggttcgaggatagcgtcgttgtgctggcgcaagtcgacacgtttcatcgccagtgtcaccagctggctgccggaagcgcggatcgcctccaccatcagttgactagaagcgaatttccctgtgccggtaaacagatgactatcaaacgttttgtccgcaatacgtaacatttcaaccccctgcaataacctgaaaaagcaggatctggtcgccatcctgcacgatatgttgcgcccactgctcacgcgggacgatttgctgattaatcgccagagccgcgcccgcttgtcgttggtcgagttgctccagtagttcgtgaacagtttgcccggcggcgcactgcatcgcttgatcgttaaacaggatctgcattgcttcctccgcataccgggcaaccactggcgcggcgcaacgccaggctgcgccactggctgcttttaccgtcgaacagtcggagttctcccgcaggtgtctctataccgcttaataacttaatggcttccagtgcctgcaaagtgcccataaccccgaccaccgggccaaccacgcccgccgtgcggcagttgcgttctggctcctggttatctggccacaggcagcggtaacacccctgctcccagggcggcgtcagtaccatcaactgaccgccaaatccgaccgcgctggcggtgataagcggcgtgttgagtgccacgcaggcggcattaatctcctggcgagtcgccatattgtcggtacagtcgagcaccacatcggcccgtgcaaccgcatcttttaacgcctcacccgttaaccgttgttgtaatgctgtcagttgaatgtcgggattcaactgtgtcagtcgctgttggctgacctggcttttcgggcgatcgatatcttcagtggtaaagaggatttgtcgttgcagattgcttaaatgcacatcgtcgtcatctgccagtaccagcgtcccgacgccagcgcccgccaggtacagcgcagcaggtgtacccagcccgcccagaccgataatcagcacctggctgtcgagcagtttttgctgcccgtccagagcgatatcgtcgagcaggatttggcggctataacgcataaagtcacggtcattcatcgccaactcctgcaatttccagcaactgtgccgttgccaaacgccagtctgcggcttgagtaatggcgctgacgacggcgatactgccgacacccgttgctatcaccgcaggcgcgcgtgccagactgataccgccaatcgccacggtgggataatccgccagtcgctcaacatgccgtgccagctgttccagcccctgcggtgcagaaggcatctgtttggtttgcgtcgggaacacatgtcccagcgcgatataagaggggcgtgctgccagcgcgacgtcgatttccatatcgtcatgtgtgctaacgcccagccgcaggcctgccgcgcggatggcattgagatcggtggcttgcaaatcttcctgccccaaatggacgccatacgcctgatgcttgatcgccagccgccagtaatcgttgataaacaatcgcgcgttatagcggcggcccagcgcaattgccgccacgacatcggcttccacctcttcatcgcgccgatctttgatgcgtagctggagagtacgtacgcctgcatccaacagacgttcgatccactgtacgctgtccaccaccgggtacagtccactacgaaaaggtacaggaggaaaatcaggctgatacatcacgcttcctccttacgcaggtagatttctccgcctctggcacggaagttctcgctcatatccgccattcccatttcaatagtttgcgtggcggcgtaatcacgcacttcctggctgattttcatgctgcagaatttcggcccacacatggagcaaaaatgggcgactttaccactctcttgcggcagggtttcatcgtgataagcgcgggcggtaaacgggtcgagggccagattaaactggtcttcccagcgaaattcgaagcgggctttgctcatggcgttatcgcgaatttgcgcgcccggatgccctttcgccaggtcagcggcgtgggcagcaatcttataggtgataagcccctgcttaacatcttctttattgggcagacccagatgctcttttggcgttacgtaacagagcatcgcgcagccaaaccagccaatcatcgccgcaccaatcccgctcgtgaagtggtcatagcccggcgcaatatcggtagttagcggccccagagtgtaaaacggcgcttcgtggcagtgctctaactcctcggtcatattgcggcggatcatctgcatcggcacgtggcctgggccttcaatcatcacctgcacgtcatattcccaggcaattttggtcagttcgcccagcgtatgcagctcggcaaactgcgcttcatcgttggcgtcctgaatagaaccggggcgcagaccgtcgcccaggctcaggctaacgtcataagcggcacagatttcacaaatttcgcggaagtgttgatagaggaaattttcctgatgatgggagaggcaccatttcgccataatgctaccgccgcgagagacgataccggtcaggcgtttcgcggtcatcggcacatagcgcagcagtacgcccgcatggatagtgaagtaatccacaccttgctcggcctgttccagcagcgtgtcgcggaacgcttcccaggtaagatcttcggcgatcccgttaaccttctccagcgcctggtagatcggcactgtaccgatcggcaccgggctgttacgcaaaatccactcgcgggtttcgtgaatatagcgaccggtggagagatccatcaccgtatccgctccccagcgcgtggaccataccagcttttccacttcttcttcgatggaagaggtgaccgcgctgttgccgatattggcgttaacttttaccaggaaattgcgaccaataatcatcggctcgctttccggatgattaatgttggccgggataatcgcacgtccggcagcaacttcatcacggacaaattccgcagtgatattttccggcagatgtgcgccaaagctcattcccggatgctggtggcgtaaaacctcgctacggatgcgctcgcggcccatattctcgcggatggcgatgaattccatttccggcgtgatgatgccctggcgggcgtagtgcagttgggtgacacggcgtcctgctttggcgcgttttggtgttagtacgccgctaaaacgcagttcgtcgaggccatcatctgccagccgcgctttagtgtaatcggaactgcgcacggtaagttcttcggtatcgccgcgcgcatcgatccacggctggcgtagttttgccagcccttgctgcacgttaatggcaatctgcggatcaccatacgggccggaggtgtcgtagaccggaatcgcttcgttttcttcgtactgcggctgttctttgctaccgccaattagcgtcgggctaagctggatctcacgcatcggcacgcgcacgccggggtgtgtgccagtgatataaatgcgtttactgttgggaaaggcggtgccttccagggtgtcgataaaatgttgggcccgggcgcgttgttcgcggcgggtcagttttgttgcagacatagctcattccaaaaagttaaggacgtggcttgtcagacgacggatgaagcaagagacgatcgccgcaggggcgatgcgatagcagattaactcttgttcccttcgcaggtattagcctgatcaggttccgcggatcccgaataaacggtctcagccagttaaggcactccgacaagaaattagccccgcaaatggggcattgaatgtaaattacgcgttaacagcgcagaactcaagcaggatgtttgacgcgggcggcgtcaagcaccagcagaatcagcttatcttccagcacaaagcgcgcttccagcgcctcgccgatgtcagataaaacctgttgaaactcaaggtaattatcatgatcgatggcggtttccagactggaatcgtagtaatccataatctgttgagtattggcttcgagttgcggccaaatcttcgcggcgcgcgcgagttgcccgttgccttccagcttatgaagaatgcgctcataaatactgaaatgtccggcagacaagtaatcgaccaggctctgacaaaaatcatcaagggctttttcgtttagcctcatgtagctttctttgccaggcttaatgccaaccagattgtagtaagccacgagcagatgcttacgtacatgtagccagcgatcaaccagtttgttacttcctctgacgcgctccgtcaggttatcgagctggttaagcatgattgactccgcaagtttgtattcaaaaactgctcagtgagaaatgtaaaaaccatgttaaacatgccagtgatgcaaaggtagtgcaagagctatggatcgtataattgaaaaattagatcacggctggtgggtcgtcagccatgaacaaaaattatggttgccgaagggagaattgccatatggcgaagcggcaaatttcgatcttgtgggtcagcgcgcactacaaatcggcgaatggcagggggaacctgtttggttagtacaacagcagcggcgtcacgatatggggagcgtacgtcaggtcattgatctcgatgttgggctgtttcaactggccggacgaggcgtacaactggcggagttttaccgaagccataaatactgtggttactgcgggcatgaaatgtatccgagcaaaaccgaatgggcgatgctgtgcagccattgccgtgagcgttactacccgcaaatcgccccctgcattattgttgccatccgtcgcgatgatagcatcctcctcgcccagcatacccgccatcgtaacggtgtccatacagtacttgccggattcgtcgaagtgggcgaaaccctcgagcaggcagtcgcgcgggaagtgatggaagagagcggaattaaagttaaaaacttgcgttacgtgacttctcagccgtggccgtttcctcagtctttaatgaccgcgtttatggcggaatatgacagcggcgacatcgtgatcgacccgaaagaattgctcgaggcgaactggtatcgctatgacgatttgccgttactcccgccgcccggcaccgtagcgcgccgtctgatagaagatacggtggcgatgtgtcgggcagagtatgagtgatgatacactgaccgcctgacgcactaaggaacagccaaaatgaccgaacttaaaaacgatcgttatctgcgggcgctgctgcgccagcccgttgatgtcactccagtatggatgatgcgccaggcgggtcgctatctaccggaatataaagccacgcgcgcccaggcaggcgattttatgagcctgtgcaaaaacgccgagctggcgtgcgaagtgactttgcaaccgctgcgtcgctacccgctggatgcggcgatcctcttttccgatatcctcaccgtgccggacgcgatggggttagggctctattttgaagccggagaaggtccgcgttttaccagcccagtcacctgcaaagctgacgtcgataaactgccaattccggacccggaagatgaactgggttacgtgatgaacgcggtgcgtaccattcgtcgcgaactgaaaggcgaagtgccgctgattggtttttccggcagcccgtggacgctggcgacctacatggtggaaggcggcagcagcaaagccttcaccgtgatcaaaaaaatgatgtatgccgatccgcaggcgctgcacgctctgctcgataaactggcgaaaagcgtcactttgtatctgaatgcgcagattaaagccggtgctcaggcagtgatgattttcgacacctggggcggcgtgcttaccgggcgcgattatcaacagttcagcctctattacatgcataaaattgttgatggtttactgcgtgaaaacgacggtcgccgcgtaccggtcacgctgtttaccaaaggcggcggacagtggctggaagccatggcagaaaccggttgcgatgcgctgggcctcgactggacaacggacatcgccgatgcgcgccgccgtgtgggcaataaagtcgcgttgcagggtaatatggatccgagcatgctgtacgcgccgcctgcccgcattgaagaagaagtagcgactatacttgcaggtttcggtcacggcgaaggtcatgtctttaaccttggtcacggcattcatcaggatgtgccgccagaacatgctggcgtgttcgtggaggcagtgcatcgactgtctgaacagtatcaccgctaaggagtgattatggatctcgcgagtttacgcgctcaacaaatcgaactggcttcttctgtgatccgcgaggatcgactcgataaagatccaccggatctgatcgccggagccgatgtcgggtttgagcagggcggagaagtgacgcgagcggcgatggtgctgctgaaatatcccagccttgagctggtcgagtataaagttgcccgcatcgccaccaccatgccttacattccaggttttctttccttccgcgaatatcctgcgctgctggcagcgtgggagatgctgagccaaaagccggatttagtgtttgtcgatggtcatgggatcagccatcctcgccgtcttggcgtcgccagccattttggcttattggtggatgtgccgaccattggcgtggcgaaaaaacggctctgcggtaaattcgaaccgctctccagcgaaccgggcgcgctggccccactgatggataaaggcgagcagctggcctgggtctggcgcagcaaagcgcgctgtaacccgttgtttatcgctaccggccatcgggtcagcgtggacagcgcgctggcgtgggtacaacgctgcatgaaaggctatcgtctgccggagccaacgcgctgggcggacgcggtggccagcgaacgtccggcgttcgtgcgctatacagcaaatcagccctaattcaggtaaactgcggataatttccgtatttgagaactcaacatgttacaaaacccaattcatctgcgtctggagcgcctggaaagctggcagcatgtcactttcatggcttgcttatgcgaacgcatgtaccccaattacgccatgttctgccagcaaaccggttttggtgatgggcaaatttaccgtcgcattctcgatctcatctgggaaacgctgaccgttaaagacgcaaaagtaaatttcgacagccaactggagaaatttgaagaagcgattcctagtgccgacgatttcgatctgtacggcgtttatccggcaatcgatgcctgcgtggcgttaagtgaactggtccatagccgtttgagtggtgaaacgctcgaacacgcggtggaagtgagtaagacctccatcacgaccgttgcgatgctggaaatgactcaggctggtcgcgaaatgagcgatgaagagcttaaagaaaacccagctgtagagcaagaatgggacattcagtgggaaatattccgacttttagctgagtgcgaagaacgcgatatcgagctgataaaaggccttagggcagacctgcgtgaggcgggtgagagcaatattggtataatttttcagcaataagaccagaaaacgtgatttaacgcctgatttgtcgtacctggagtcttccctttcgccccccgtctggtctacatttggggggcgaaaaaaagtggctatcggtgcgtgtatgcaggagagtgctattctggcatttccgtcgcactcgatgcttagcaagcgataaacacattgtaaggataacttatgaacaagactcaactgattgatgtaattgcagagaaagcagaactgtccaaaacccaggctaaagctgctctggagtccactctggctgcaattactgagtctctgaaagaaggcgatgctgtacaactggttggtttcggtaccttcaaagtgaaccaccgcgctgagcgtactggccgcaacccgcagaccggtaaagaaatcaaaattgccgcagctaacgtaccggcatttgtttctggcaaggcactgaaagacgcagttaagtaagattgcgtggcagtgaacagttttaacgaaggggtggttagtccccttttgtctttctggcgtcgaagtttgatgctggctggcgctctgcttctcactgcctgtagtcataactctagtcttcctccctttaccgccagtggatttgctgaagaccagggcgcggtacgcatctggcgaaaagacagcggcgataatgtgcatctgcttgccgtgtttagcccgtggcgcagtggcgataccacgacgcgagagtatcgctggcagggcgataacctcacgctcatcaatatcaatgtttacagcaaaccgccggtgaatattcgcgcgcgttttgacgatcgcggtgatctgagctttatgcaacgtgaatccgatggggaaaagcagcagctttctaacgaccaaatcgatttataccgttatcgtgctgatcagatccgccagattagcgatgccttacgtcaggggagagtcgtgctgcgccaggggcgctggcatgcgatggaacagaccgtgaccacctgcgaagggcaaaccattaaacctgatttagatagccaggcgatagcgcatatcgagcgccgccagagccgctcttctgttgatgtcagcgtggcatggctggaagcgcccgaaggtagccaattactgttagtggcaaactctgatttctgtcgctggcaacccaacgagaaaacgttctgatttaccagtggcccatacccatatgaccgccaccaccgcagccgccgtagcccatgcccattccggctccgcgcggaatacccgcttcagccatcgcgatatctcgtttcacccgtaactcatctaagctctgacgcaaattctccatctctttggcgaccgcgttaattttgctgctatccggtgggttcgcggctaacagggcattgtattcataacgcttcgtcaccagttgctgttgcagtgcgctgctttgagcgtaaaagtcattatggattttctgccacgctgtctgttgttcgctggtcaaaggcgcggcattttgctgccacataccgtgtccgccgtgagcaaatgcagatgtgcttcccatcgccattgcactaagcgccatcattaccagggcaattttcgtgttccgtttcatggttaatcctccagtggttgtcttacttcgggtattgcatcttccgtgccaacgatgaaacgctgatatgacgggtaatctggcatgataaacgagtaaaaatgactcgcctgctgcgggtagcgagtcatttttactcattgaaacttaagcctttgtgttacagcgcagggtaagcgctgataaaagatggcatgatttctgctgtcagaaagggatgagcaggcaaagaagaagatgcgttttatgcaacgttctaaagactccttagctaaatggttaagcgcgatcctccccgtggtcattgttgggctggtgggattgtttgcggtaactgtgattcgtgattatgggcgggcaagcgaggcagaccgccaggcattactggaaaaaggtaatgtgcttatccgcgctctggagagcggaagccgcgtagggatggggatgcgaatgcaccatgtacagcaacaggcgcttctggaagagatggcgggacagccgggagtgttgtggttcgcagtcaccgatgcgcagggcatcattattcttcatagcgaccccgataaggtcgggcgtgcgctctatagcccggatgaaatgcagaaattaaagccagaggaaaactcccgctggcggctgcttgggaaaacggaaactacgcctgcacttgaggtctatcgtttgttccagccaatgagtgcgccctggcggcatggaatgcacaatatgccgcgctgtaacggcaaagctgtgccacaagtagatgcacaacaggctatttttatcgccgttgatgccagtgatctggttgcaacccagagtggggaaaagcgcaataccctgattatcctcttcgccctggcgacggtcttgctggcaagcgtattgagtttcttctggtatcgccgctatctgcgcagccgccagcttctacaagatgaaatgaagcgcaaagagaagctggtggcgctggggcatcttgcggcaggcgttgcccacgaaatccgtaacccactttccagcattaaaggactggcgaaatactttgccgagcgcgcgcctgcagggggagaagcgcatcaactggcgcaggtgatggcgaaagaggccgaccgtttaaaccgcgtggtaagcgagttgctggaactggttaagccaacgcatctggctttgcaggcggtggatctcaacacgctgattaaccacagtttacagctggtaagtcaggatgcaaacagccgggagatccagttacgctttaccgccaacgacacattaccggaaattcaggccgacccggacaggctgactcaggtcctgttgaatctctatctcaatgctattcaggcgattggtcagcatggcgtgattagcgtgacggccagcgaaagcggcgcgggcgtgaaaatcagcgttaccgacagcggtaagggaattgcggcagatcagcttgatgccatcttcactccgtacttcaccactaaagccgaaggcaccggattggggctggcggtcgtgcataatattgttgaacaacacggtggtacaattcaggtcgcaagccaggagggaaaaggcagtacgttcaccctctggcttccggtcaatattacgcgtaaggacccacaaggatgacgcacgataatatcgatattctggtggtggatgatgacattagccactgcactattttgcaggctttactgcgcggctggggctataacgtcgcgctggcgaacagcgggcgacaggcgttggagcaggtgcgggaacaggtttttgatcttgtgctttgcgatgtgcgaatggcggagatggacggcatcgccacgctgaaagagatcaaagcgttaaacccggcaattccggtgctgattatgactgcgtactccagcgtcgagacggcggtagaggcactgaaaactggggcgctggattatctcatcaagccgctggatttcgataacctacaggcgacgctggaaaaagcgctcgcgcatacgcacagtattgatgctgaaacacctgcggtgactgccagccagttcggtatggtcggtaaaagcccggcgatgcaacacctgctcagtgaaatcgccctcgtcgcgccaagcgaagccacggtactgatccacggcgattccggcaccggtaaagagctggtcgccagggcgattcacgccagtagcgcacgtagcgaaaaaccgctggtaacgctcaactgtgcggcactcaacgaatccttgctggaatctgaattgttcggtcacgaaaaaggggcgtttactggagccgataaacgccgggaagggcgctttgttgaggcggacggcggcacgctgtttctcgatgaaattggcgatatcagcccgatgatgcaggtgcgtctgctgcgtgcgattcaggagcgcgaagttcagcgtgtcggtagcaaccagattatcagcgttgatgtccggctgattgcggcgacccatcgcgatcttgccgcagaggtgaatgccgggcgttttcgccaggatctctactatcgcctgaatgtggtggcgattgaagtaccaagcctgcggcaacggcgggaagatatccctctgctggctggccattttctgcagcgctttgccgagcgtaatcgcaaggcggtaaaaggttttacgccccaggcgatggatctgttgattcattacgactggccgggaaatattcgtgagctggaaaacgcggtggaacgggcagtggtgctgctgaccggggaatatatttccgaacgcgagctgccgctggcgattgccagtacgccgatcccgctgggacaaagtcaggatattcagccgttggtggaagtggaaaaagaggtgattctggcggcgctggagaaaacgggcggcaacaaaaccgaagccgcccgtcagttagggatcacgcgcaaaacgctattggcaaaactgagccgttaattctgctcgcgttcgatagcgcgccagccgatatctttccggcagaagcagtcgtcccagtggatatcggtcattaaggcataggcgcgtttctgcgcttctgccacggtatgacccagcgcggtgacgcacagtacgcgcccgccgttggtcactacctgctcgtcatccgccagttttgtgcccgcgtggaacactttgccgcctgccacttcttccagcggcaggccgtggatcacgtcaccggtgcggtaatcacccggatatccacccgcagccatcaccacgccgagagaagcgcgttcatcccactcggacgttttctcgtccagtttgctttcacaggccgccaggcagagctcaaccagatcggacttcatgcgcagcataatcggctgggtttccggatcgccaaagcggcagttaaattcaataaccttcggattgccctgtttgtcgatcatcaggcccgcgtagagaaaaccggtgtaggtgttgccttccgccgccatgcctttcacggttggccagataatacgttccatggtgcgctgatgaacgtcatcggttactaccggcgcgggggagtaagcgcccatcccgccggtgtttggtccggtatctttatcgcctacgcgtttgtgatcctggctggtagccatcggcagcacatgctcgccgtccaccatcacgataaagctcgcttcttcgccatcgaggaactcttcgataacgatgcgatgacccgcgtcgccaaaagcgttgcccgccagcatatcgtgaacagccgcttccgcttcttccagcgtcatcgccacgataacgcctttcccggcagccagaccgtccgctttaatgacgattggcgcgcctttctcacgcagatacgccagcgcaggttctacctcggtgaagttctggtattccgccgtagggatcttatggcgggccaggaaatctttggtaaacgctttactgccttccagttgggccgcacctgcggttgggccgaagattttcagcccggcggcgcggaaggtatcgaccacgcctttcaccagcggcgcttccgggccgacgatggtcagatcaatcttttcgttttgtgcgaaatccaacagcgccgggatatcggtcacgccaatagcaacgttttgcagcgcgggttccagtgcagtgcctgcattacccggagcaacaaaaacagtctcaaccagcgggctctgggccgctttccaggccagcgcgtgctcgcgcccgccgttaccaatcactaatactttcatctattgctccattaatggcggaagtggcgcatgtcggtgaagagcatcgcaataccgtgctcgtcggcggcggcaatcacttcgtcatcacggatagaaccgccaggctggattacgcaggtcacgcccgcagcggcggcggcatcaataccgtcgcggaacgggaagaacgcgtcagaagccatgctggaacctttcacttccaggccttcatcggccgctttaataccggcgatttttgcggagtacacgcggctcatctggcccgcgccaatgccgatagtcatattgtttttggcatagacgatagcgttggatttcacaaacttcgccaccttccagcagaacagcgcatcacgcagttcctgttcgctcggctgacgtttggtcaccacgcgcagttcttccgcaccgaccatccccaggtcacgatcctgaaccagcagaccgccgttcacgcgtttgaaatcgaggcccggaacacgctcgccccactgaccgcaggtcagaacgcgtacgttctgtttggcggcggtgattttcagggcttcttcgctggcggacggcgcaataatcacttcgacaaactgacgagaaatgatggcctgtgcggtttccgcatccagctcgcggttaaaggcaatgatgccgccgaatgcggaggttgggtcggttttgtacgcgcgatcgtaagcatcaagaatggaattgccgatagccacgccgcaagggttggcgtgcttcacaatcacacatgccggctcggcgaactctttcacgcactccagcgccgcatcggtatcggcgatgttgttataagagagggctttaccctgaacctgggttgcggtagcaacggaggcttctttcacattctcttctatatagaaggcagcctgctggtggctgttctcgccgtaacgcatatccagcttcttaatgaagttcaggttcagcgtgcgtgggaagcgaccggcggcttctttgctttcaccgtggtaagccggaaccatgctgccgaagtagttggcaatcatgctgtcgtaggcggcagtgtgttcgaaggctttgatggcgaggtcgaaacgggttgcaagcgtcaggcttccttcgttgtcatccatctctttaataatggcgtcatagtcgctgctcttcaccacgattgcgacatctttatggttcttggcggcggagcgcaccatcgttgggccgccgatatcgatgttctcaaccgcatcttccaggctgcaaccttcacgggccacggtctgggcgaacggatacaggttaacaaccaccatatcgataggctggatctgatgttcttccataatggcatcgtcctggccgcgacggcccagaatgccaccatgtactttcggatgcagggtcttcacgcgtccatccatcatctccgggaaaccggtgtaatcggaaacttcggttaccggcagacctttttctgctaacagacgggcagtgccccctgtagacagcagctccacaccgcgtgcggaaagtgcctgggcgaattcgacgataccggctttgtcagaaacactgagcagagcgcggcggactggacgacgttgttgcatggtaaatcccctggatttgactattacagagagcgttagctgaatttttcgcgaaaaactcagctaacgcccctaacggggcatccttatttttcgcccgcattgtaacgaaaacgtttgcgcaacgctcgcgaatttttctctttcaatggtgatcacaattttgactgtggttaccgtgggcaaaatacagaaattacattgatgattgtggataactctgtgcgtaaaaaggtataaagcgggcttttgctggggaatgcagcagtcagtcatttttctgcaatttttctattgcggcctgcggagaactccctataatgcgcctccatcgacacggcggatgtgaatcacttcacacaaacagccggttcggttgaagagaaaaatcctgaaattcagggttgactctgaaagaggaaagcgtaatatacgccacctcgcgacagtgcgctaaagcgcgtcgcaactgctctttaacaatttatcagacaatctgtgtgggcactcgaagatacggattcttaacgtcgcaagacgaaaaatgaataccaagtctcaagagtgaacacgtaattcattacgaagtttaattctttgagcatcaaacttttaaattgaagagtttgatcatggctcagattgaacgctggcggcaggcctaacacatgcaagtcgaacggtaacaggaagaagcttgcttctttgctgacgagtggcggacgggtgagtaatgtctgggaaactgcctgatggagggggataactactggaaacggtagctaataccgcataacgtcgcaagaccaaagagggggaccttcgggcctcttgccatcggatgtgcccagatgggattagctagtaggtggggtaacggctcacctaggcgacgatccctagctggtctgagaggatgaccagccacactggaactgagacacggtccagactcctacgggaggcagcagtggggaatattgcacaatgggcgcaagcctgatgcagccatgccgcgtgtatgaagaaggccttcgggttgtaaagtactttcagcggggaggaagggagtaaagttaatacctttgctcattgacgttacccgcagaagaagcaccggctaactccgtgccagcagccgcggtaatacggagggtgcaagcgttaatcggaattactgggcgtaaagcgcacgcaggcggtttgttaagtcagatgtgaaatccccgggctcaacctgggaactgcatctgatactggcaagcttgagtctcgtagaggggggtagaattccaggtgtagcggtgaaatgcgtagagatctggaggaataccggtggcgaaggcggccccctggacgaagactgacgctcaggtgcgaaagcgtggggagcaaacaggattagataccctggtagtccacgccgtaaacgatgtcgacttggaggttgtgcccttgaggcgtggcttccggagctaacgcgttaagtcgaccgcctggggagtacggccgcaaggttaaaactcaaatgaattgacgggggcccgcacaagcggtggagcatgtggtttaattcgatgcaacgcgaagaaccttacctggtcttgacatccacggaagttttcagagatgagaatgtgccttcgggaaccgtgagacaggtgctgcatggctgtcgtcagctcgtgttgtgaaatgttgggttaagtcccgcaacgagcgcaacccttatcctttgttgccagcggtccggccgggaactcaaaggagactgccagtgataaactggaggaaggtggggatgacgtcaagtcatcatggcccttacgaccagggctacacacgtgctacaatggcgcatacaaagagaagcgacctcgcgagagcaagcggacctcataaagtgcgtcgtagtccggattggagtctgcaactcgactccatgaagtcggaatcgctagtaatcgtggatcagaatgccacggtgaatacgttcccgggccttgtacacaccgcccgtcacaccatgggagtgggttgcaaaagaagtaggtagcttaaccttcgggagggcgcttaccactttgtgattcatgactggggtgaagtcgtaacaaggtaaccgtaggggaacctgcggttggatcacctccttaccttaaagaagcgttctttgcagtgctcacacagattgtctgatagaaagtgaaaagcaaggcgtcttgcgaagcagactgatacgtccccttcgtctagaggcccaggacaccgccctttcacggcggtaacaggggttcgaatcccctaggggacgccacttgctggtttgtgagtgaaagtcacctgccttaatatctcaaaactcatcttcgggtgatgtttgagatatttgctctttaaaaatctggatcaagctgaaaattgaaacactgaacaacgaaagttgttcgtgagtctctcaaattttcgcaacacgatgatgaatcgtaagaaacatcttcgggttgtgaggttaagcgactaagcgtacacggtggatgccctggcagtcagaggcgatgaaggacgtgctaatctgcgataagcgtcggtaaggtgatatgaaccgttataaccggcgatttccgaatggggaaacccagtgtgtttcgacacactatcattaactgaatccataggttaatgaggcgaaccgggggaactgaaacatctaagtaccccgaggaaaagaaatcaaccgagattcccccagtagcggcgagcgaacggggagcagcccagagcctgaatcagtgtgtgtgttagtggaagcgtctggaaaggcgcgcgatacagggtgacagccccgtacacaaaaatgcacatgctgtgagctcgatgagtagggcgggacacgtggtatcctgtctgaatatggggggaccatcctccaaggctaaatactcctgactgaccgatagtgaaccagtaccgtgagggaaaggcgaaaagaaccccggcgaggggagtgaaaaagaacctgaaaccgtgtacgtacaagcagtgggagcacgcttaggcgtgtgactgcgtaccttttgtataatgggtcagcgacttatattctgtagcaaggttaaccgaataggggagccgaagggaaaccgagtcttaactgggcgttaagttgcagggtatagacccgaaacccggtgatctagccatgggcaggttgaaggttgggtaacactaactggaggaccgaaccgactaatgttgaaaaattagcggatgacttgtggctgggggtgaaaggccaatcaaaccgggagatagctggttctccccgaaagctatttaggtagcgcctcgtgaattcatctccgggggtagagcactgtttcggcaagggggtcatcccgacttaccaacccgatgcaaactgcgaataccggagaatgttatcacgggagacacacggcgggtgctaacgtccgtcgtgaagagggaaacaacccagaccgccagctaaggtcccaaagtcatggttaagtgggaaacgatgtgggaaggcccagacagccaggatgttggcttagaagcagccatcatttaaagaaagcgtaatagctcactggtcgagtcggcctgcgcggaagatgtaacggggctaaaccatgcaccgaagctgcggcagcgacgcttatgcgttgttgggtaggggagcgttctgtaagcctgcgaaggtgtgctgtgaggcatgctggaggtatcagaagtgcgaatgctgacataagtaacgataaagcgggtgaaaagcccgctcgccggaagaccaagggttcctgtccaacgttaatcggggcagggtgagtcgacccctaaggcgaggccgaaaggcgtagtcgatgggaaacaggttaatattcctgtacttggtgttactgcgaaggggggacggagaaggctatgttggccgggcgacggttgtcccggtttaagcgtgtaggctggttttccaggcaaatccggaaaatcaaggctgaggcgtgatgacgaggcactacggtgctgaagcaacaaatgccctgcttccaggaaaagcctctaagcatcaggtaacatcaaatcgtaccccaaaccgacacaggtggtcaggtagagaataccaaggcgcttgagagaactcgggtgaaggaactaggcaaaatggtgccgtaacttcgggagaaggcacgctgatatgtaggtgaggtccctcgcggatggagctgaaatcagtcgaagataccagctggctgcaactgtttattaaaaacacagcactgtgcaaacacgaaagtggacgtatacggtgtgacgcctgcccggtgccggaaggttaattgatggggttagcgcaagcgaagctcttgatcgaagccccggtaaacggcggccgtaactataacggtcctaaggtagcgaaattccttgtcgggtaagttccgacctgcacgaatggcgtaatgatggccaggctgtctccacccgagactcagtgaaattgaactcgctgtgaagatgcagtgtacccgcggcaagacggaaagaccccgtgaacctttactatagcttgacactgaacattgagccttgatgtgtaggataggtgggaggctttgaagtgtggacgccagtctgcatggagccgaccttgaaataccaccctttaatgtttgatgttctaacgttgacccgtaatccgggttgcggacagtgtctggtgggtagtttgactggggcggtctcctcctaaagagtaacggaggagcacgaaggttggctaatcctggtcggacatcaggaggttagtgcaatggcataagccagcttgactgcgagcgtgacggcgcgagcaggtgcgaaagcaggtcatagtgatccggtggttctgaatggaagggccatcgctcaacggataaaaggtactccggggataacaggctgataccgcccaagagttcatatcgacggcggtgtttggcacctcgatgtcggctcatcacatcctggggctgaagtaggtcccaagggtatggctgttcgccatttaaagtggtacgcgagctgggtttagaacgtcgtgagacagttcggtccctatctgccgtgggcgctggagaactgaggggggctgctcctagtacgagaggaccggagtggacgcatcactggtgttcgggttgtcatgccaatggcactgcccggtagctaaatgcggaagagataagtgctgaaagcatctaagcacgaaacttgccccgagatgagttctccctgactccttgagagtcctgaaggaacgttgaagacgacgacgttgataggccgggtgtgtaagcgcagcgatgcgttgagctaaccggtactaatgaaccgtgaggcttaaccttacaacgccgaaggtgttttggcggattgagagaagattttcagcctgatacagattaaatcagaacgcagaagcggtctgataaaacagaatttgcctggcggcagtagcgcggtggtcccacctgaccccatgccgaactcagaagtgaaacgccgtagcgccgatggtagtgtggggtctccccatgcgagagtagggaactgccaggcatcaaattagaaaaaccccggtccataaggccggggttttttgcatatcaattatttgcatgatgaagggaatctcatgagtgttctgtatatccaaattcgtcgtaatcaaattactgttcgcgatcttgaaagcaaacgtgaagtgagtggagacgctgccttcagtaaccagcgcctgttaatcgccaatttctttgttgcagaaaaagttctgcaagatcttgttctgcaactccacccacgtagtacctggcattcttttttgccagcaaaacgtatggatattgttgtgagcgcactggaaatgaatgagggcggtttgagtcaggttgaggaacgcattctccatgaagtggtcgctggggcaacgttaatgaaatatcgccagttccacatccatgcgcaaagtgcggtactcagtgatagtgcggtcatggcaatgcttaagcagaaataatcgtgtcaccattggtgggtactaaacctgaagttcagcccaccgggatgagaaaaaatcgcttacgcccccacatacgccagattcagcaacggatacggtttccccaaatcgtccacctcagagcgtcccgtaaccttaaaacccaccttcttatagaacccaaccgcctgctcattttgctcattaacgttggttgtcagttccggtgccatgctgagcgcatgctccaccagcacccgacctacgccgcagccgcgcacatcaggatcgataaacagcgcatccatatgctgcccacttagcaacataaatccaaccggctgatcccgctcattaaccgcgacccacaacggcgcttccggcaggaaggaacgaactaggtcctccagctcggtccgatactctgcacttagaaaatcgtgagtggcatcgacagaacgacaccaaatcgcaacgagttcctccccttcctcatgccgactgcggcgaatactaataaccattttctctccttttagtcattcttatattctaacgtagtcttttccttgaaactttctcaccttcaacatgcaggctcgacattggcaaattttctggttatcttcagctatctggatgtctaaacgtataagcgtatgtagtgaggtaatcaggttatgccgattcgtgtgccggacgagctacccgccgtcaatttcttgcgtgaagaaaacgtctttgtgatgacaacttctcgtgcgtctggtcaggaaattcgtccacttaaggttctgatccttaacctgatgccgaagaagattgaaactgaaaatcagtttctgcgcctgcttagtaacagtcctttgcaggtcgatattcagctgttgcgcatcgattcccgtgaaagccgcaacacgcccgcagagcatctgaacaacttctactgtaactttgaagatattcaggatcagaactttgacggtttgattgtaactggtgcgccgctgggcctggtggagtttaatgatgtcgcttactggccgcagatcaaacaggtgctggagtggagcaaagatcacgtcaccagcacgctgtttgtctgctgggcggtacaggccgcgctcaatatcctctacggcattcctaagcaaactcgcaccgaaaaactctctggcgtttacgagcatcatattctccatcctcatgcgcttctgacgcgtggctttgatgatagtttcctggcaccgcatagccgctatgctgactttccggcagcgttgattcgtgattacaccgatctggaaattctggcagagacggaagaaggggatgcatatctgtttgccagtaaagataagcgcattgcctttgtgacgggccatcccgaatatgatgcgcaaacgctggcgcaggaatttttccgcgatgtggaagccggactagacccggatgtaccgtataactatttcccgcacaatgatccgcaaaatacaccgcgagcgagctggcgtagtcacggtaatttactgtttaccaactggctcaactattacgtctaccagatcacgccatacgatctacggcacatgaatccaacgctggattaatcttctgtgatagtcgatcgttaagcgattcagcaccttacctcaggcaccttcgggtgccttttttatttccgaaacgtacctcagcaggtgaataaattttattcatattgttatcaacaagttatcaagtatttttaattaaaatggaaattgtttttgattttgcattttaaatgagtagtcttagttgtgctgaacgaaaagagcacaacgatccttcgttcacagtggggaagttttcggatccatgacgaggagctgcacgatgactgaacaggcaacaacaaccgatgaactggctttcacaaggccgtatggcgagcaggagaagcaaattcttactgccgaagcggtagaatttctgactgagctggtgacgcattttacgccacaacgcaataaacttctggcagcgcgcattcagcagcagcaagatattgataacggaacgttgcctgattttattagcgaaacagcttccattcgcgatgctgattggaaaattcgcgggattcctgcggacttagaagaccgccgcgtagagataactggcccggtagagcgcaagatggtgatcaacgcgctcaacgccaatgtgaaagtctttatggccgatttcgaagatagtctggcaccagactggaacaaagtgatcgacgggcaaattaacctgcgtgatgcggttaacggcaccatcagttacaccaatgaagcaggcaaaatttaccagctcaagcccaatccagcggttttgatttgtcgggtacgcggtctgcacttgccggaaaaacatgtcacctggcgtggtgaggcaatccccggcagcctgtttgattttgcgctctatttcttccacaactatcaggcactgttggcaaagggcagtggtccctatttctatctgccgaaaacccagtcctggcaggaagcggcctggtggagcgaagtcttcagctatgcagaagatcgctttaatctgccgcgcggcaccatcaaggcgacgttgctgattgaaacgctgcccgccgtgttccagatggatgaaatccttcacgcgctgcgtgaccatattgttggtctgaactgcggtcgttgggattacatcttcagctatatcaaaacgttgaaaaactatcccgatcgcgtcctgccagacagacaggcagtgacgatggataaaccattcctgaatgcttacagtcgcctgttgattaaaacctgccataaacgcggtgcttttgcgatgggcggcatggcggcgtttattccgagcaaagatgaagagcacaataaccaggtgctcaacaaagtaaaagcggataaaagcctggaagccaataacggtcacgatggcacatggatcgctcacccaggccttgcggacacggcaatggcggtattcaacgacattctcggctcccgtaaaaatcagcttgaagtgatgcgcgaacaagacgcgccgattactgccgatcagctgctggcaccttgtgatggtgaacgcaccgaagaaggtatgcgcgccaacattcgcgtggctgtgcagtacatcgaagcgtggatctctggcaacggctgtgtgccgatttatggcctgatggaagatgcggcgacggctgaaatttcccgtaccagcatctggcagtggatccatcatcaaaaaacgttgagcaatggcaaaccggtgaccaaagccttgttccgccagatgctgggcgaagagatgaaagtcattgccagcgaactgggcgaagaacgtttctcccaggggcgttttgacgatgccgcacgcttgatggaacagatcaccacttccgatgagttaattgatttcctgaccctgccaggctaccgcctgttagcgtaaaccaccacataactatggagcatctgcacatgaaaacccgtacacaacaaattgaagaattacagaaagagtggactcaaccgcgttgggaaggcattactcgcccatacagtgcggaagatgtggtgaaattacgcggtagtgtcaatcctgaatgcacgctggcgcaactgggcgcagcgaaaatgtggcgtctgctgcacggtgagagcaaaaaaggctacatcaacagcctcggcgcactgactggcggtcaggcgctgcaacaggcgaaagcgggtattgaagcagtctatctgagcggatggcaggtagcggcggacgctaacctggcggccagcatgtatccggatcagagcctctatccggcaaacagcgtgccagctgtggtggagcggatcaacaacaccttccgtcgtgccgatcagatccaatggtccgcgggcattgagccgggcgatccgcgctatgtcgattacttcctgccgatcgttgccgatgcggaagccggttttggcggtgtcctgaatgcctttgaactgatgaaagcgatgattgaagccggtgcagcggcagttcacttcgaagatcagctggcgagtgtgaagaaatgcggtcacatgggcggcaaagttttagtgccaactcaggaagctattcagaaactggtcgcggcgcgtctggcagctgacgtgacgggcgttccaaccctgctggttgcccgtaccgatgctgatgcggcggatctgatcacctccgattgcgacccgtatgacagcgaatttattaccggcgagcgtaccagtgaaggcttcttccgtactcatgcgggcattgagcaagcgatcagccgtggcctggcgtatgcgccatatgctgacctggtctggtgtgaaacctccacgccggatctggaactggcgcgtcgctttgcacaagctatccacgcgaaatatccgggcaaactgctggcttataactgcagcccgagcttcaactggcagaaaaacctcgacgacaaaactattgccagcttccagcagcagctgagcgatatgggctacaagttccagttcatcaccctggcaggtatccacagcatgtggttcaacatgtttgacctggcaaacgcctatgcccagggcgagggtatgaagcactacgttgagaaagtgcagcagccggaatttgccgccgcgaaagatggctataccttcgtatctcaccagcaggaagtgggtacaggttacttcgataaagtgacgactattattcagggcggcacgtctagtgtcaccgcgctgaccggctccactgaagaaagccagttctaagcaacaacaaccgttgctgactgtaggccggataaggcgttcacgccgcatccggcaatcggtgcacgatgcctgatgcgacgcttgcgcgtcttatcatgcctacagccgttgccgaacgtaggctggataaggcgtttacgccgcatccggcaattctctgctcctgatgagggcgctaaatgccgcgtggcctggaattattgattgctcaaaccattttgcaaggcttcgatgctcagtatggtcgattcctcgaagtgacctccggtgcgcagcagcgtttcgaacaggccgactggcatgctgtccagcaggcgatgaaaaaccgtatccatctttacgatcatcacgttggtctggtcgtggagcaactgcgctgcattactaacggccaaagtacggacgcggcatttttactacgtgttaaagagcattacacccggctgttgccggattacccgcgcttcgagattgcggagagcttttttaactccgtgtactgtcggttatttgaccaccgcagccttactcccgagcggctttttatctttagctctcagccagagcgccgctttcgtaccattccccgcccgctggcgaaagactttcaccccgatcacggctgggaatctctactgatgcgcgttatcagcgacctaccgctgcgcctgcgctggcagaataaaagccgtgacatccattacattattcgccatctgacggaaacgctggggacagacaacctcgcggaaagtcatttacaggtggcgaacgaactgttttaccgcaataaagccgcctggctggtaggcaaactgatcacaccttccggcacattgccatttttgctgccgatccaccagacggacgacggcgagttatttattgatacctgcctgacgacgaccgccgaagcgagcattgtttttggctttgcgcgttcttattttatggtttatgcgccgctgcccgcagcgctggtcgagtggctacgggaaattctgccaggtaaaaccaccgctgaattgtatatggctatcggctgccagaagcacgccaaaaccgaaagctaccgcgaatatctcgtttatctacagggctgtaatgagcagttcattgaagcgccgggtattcgtggaatggtgatgttggtgtttacgctgccgggctttgatcgggtattcaaagtcatcaaagacaggttcgcgccgcagaaagagatgtctgccgctcacgttcgtgcctgctatcaactggtgaaagagcacgatcgcgtgggccgaatggcggacacccaggagtttgaaaactttgtgctggagaagcggcatatttccccggcattaatggaattactgcttcaggaagcagcggaaaaaatcaccgatctcggcgaacaaattgtgattcgccatctttatattgagcggcggatggtgccgctcaatatctggctggaacaagtggaaggtcagcagttgcgcgacgccattgaagaatacggtaacgctattcgccagcttgccgctgctaacattttccctggcgacatgctgtttaaaaacttcggtgtcacccgtcacgggcgtgtggttttttatgattacgatgaaatttgctacatgacggaagtgaatttccgcgacatcccgccgccgcgctatccggaagacgaacttgccagcgaaccgtggtacagcgtcagcccgggcgatgttttcccggaagagtttcgccactggctatgcgccgacccgcgtattggtccgctgtttgaagagatgcacgccgacctgttccgcgctgattactggcgcgcactacaaaaccgcatacgtgaagggcatgtggaagatgtttatgcgtatcggcgcaggcaaagatttagcgtacggtatggggagatgcttttttgagtaaagcttccatataatttttctccgcaatgtatcgagggttatccgtaaagccaaagctttcagccatcttatttaatgtattaaggattaattcagcaataacccggtgaccaaattcaaaagccaactcaaaggcagagtatttttgtggggctttgtgttgccaaaaatccataatatcttcagcggtaaatccaaacaggcgtgcatggtcagataaagcaagataaaccgtctctacaacattttgttgtttatgctgtatcgcactaaacaaaccgggatattcattagaattatttgccaggaggaggggcttcatattttttttatcgaatttaaacgtattaaacagagtgggtaatgcgttaaaaatagtattaataacgttcatgtgtccgcgctgcatggccataaacaaacccgtgtcgcgcgcaagacttttagcggtcagaagatctacaatatcggaagcactaatgttaatttcctgggctaggctgggcaatgcttcaagaataactttcacgatatcgctatgtccattttgcatcgccagatatagtcctgggcaaccataaaaatcctttgccttcaggagatcgagtacctgttctttagtcaaatgacatgtgcgaattaacaaaggtaacgcgttcaaaacaattttcagcatgtcggcatcaccattcgccataacatggtataaaacatggctggacgttctatttttggcactcaggaatttatacacttgttcgttatctaaatgatgtgttgcggccagtttaggtaaggcgttcagaatgctggttacaacatttttatccttacgacttatcgctaaaaataatccagaaaaaccatttttatcttttgcctccagaatatgcatgagattttttttgctgagtaatccttcatatcctgtttcactcaaactattgaaaatagtctcaacgatatccgcattaccataatttatagccaaatataaacctggcaggttaatactattataggcagtcaacatttctgttctatgtagttctggcattttctggagttgaatcatcagttgcgtaagttggtgattctgaccaattgccattagcaaattcatcgttgcaggacttaatggaggggttatttcatccacagatccttttaacatcaatagctgttctttcggaagtgctggaattattgcaacagattgattaataacatgatcattactccatttcaggaggctataatctacattcataaaatccatcagagaatagtgtttaatattctctttgctttcgctcataattcttattttatcgttagttacattaggatcataaacgctaaccacgtaatgggtacatccttcagttgtgttctttattcttagccggaccgtcaaagcatggttatccaccagtaatatggctgccataacactgatgccattactttccatcttgtcaaaatatgctttcataactagcccgaaatcaccgcaggcagcaacgcaacgcccctcaggacggctggaaaccaacgccaaagtctggtttttgcattttttgttgaagtgcgtgagaaatttttcagcactagagtaatcatcttgatggggtttgtaatcaacattctgataaatatcattaatatattgtgcagcaatgtgtcggcatactatacggttttggggtcgccccggaaaataacattgaccattaagtttaattcttgggaattctttttcttttctatcactttttaggtttaattcttgtttatcaagagtgtcactgcgttgaggtaaaatttccattaggtatttttcaaatattggggcaatggtttgagtaagtgtcgtgttttcgtttttattaattatcgtaatttctttcttatcagcttgtaagacggacgtggaaaatttaatgacaaaatccttgttgctaaagatatgacgaccattttgtctacagttctcactgaagctttttaatagaggcgtcgccagctccttgccagaaaatttatcctcgagttctttataaaacaattcactcagggtttggtgttcatttgtctgggctgtattattaatatttgcagagaaagaactacgaggaatacgagtaatcatttaaatatctcattgtttattgatgtcttgaattttaactatcagaacagtgaaaaaatttaatatgattacaactaaagaaatatcataaatcgctcaatctcataatgcagccgtaaaagtttcggtggaatgagatcttgcgattttgttaataattaagtggtttgatgtttaaaaataatgctgagttaataaaagtgtgtgaagtgtatgacattaagttattttggcgtcaatgcgattaacagacacccttattctattgccactcaggtatgatgggcagaatattgcctctgcccgccagaaaaagtcagcgcattccaccgtacgccagcgtcacttccttcgccgctttaatcaccatcgcgccaaactcggtcacgcggtcatcggtaatacgactaatcggtccggaaatagaaattgcggcaaacggttcacggtgctcatcgaaaatacacgctgcaaggcaacgtagccccagtgcatgttcctcatcgtcaaaactataaccccgtttgcgcgtttgggcgagatcttcttttaaatgcacaggagacaccagcgttgcgtgggtataggcatgtaaccctttgcggtgcagcagcttcgtcacctgttcttcgctcagttgggctaaaaaggctttacccgcaccggaagcgtgcatcggcaatttaccgccgataggcgcggacattcgcatcagatgcgtacactgtacctggtcgataataatcgcttcgtgatcgctttgatcaagcaccgccatattgaccgtttcgccagactcttccattagattgcgcaggatagggtgaacaatcgctaacaaattacggctctggagaaagctgctgccgaccataaaggcatgtgcgccgattgcccaatgtcccagttcgccaacctgacgcacgaaaccctgctgttgcatcgtggttagcaggcggtgggtcgtggaattgggtaacccggcttgttgcgccagttccgtgagtgccacactgccattggattcggcaatccactccagtaatttcaggccacgcgttaaagactgaacctgtccagtcgctggtgcggtggcaacggcgggttttctgccgcgtttcgcgggaatgggtgcgaccatgacagtctcttttttctgtatcgtggaaatcattttcatttttattgttagctaatgcaatagttactgaactgatccgatgagttaatgttgaacaaatctcatgttgcgtggtggtcgcttttaccacagatgcgtttatgccagtatggtttgttgaatttttattaaatctgggttgagcgtgtcgggagcaagtgtgagcagcaaagtggaacaactgcgtgcgcagttaaatgaacgtattctggtgctggacggcggtatgggcaccatgatccagagttatcgactgaacgaagccgattttcgtggtgaacgctttgccgactggccatgcgacctcaaaggcaacaacgacctgctggtactcagtaaaccggaagtgatcgccgctatccacaacgcctactttgaagcgggcgcggatatcatcgaaaccaacaccttcaactccacgaccattgcgatggcggattaccagatggaatccctgagcgcggaaatcaactttgcggcggcgaaactggcgcgagcttgtgctgacgagtggaccgcgcgcacgccagagaaaccgcgctacgttgccggtgttctcggcccgaccaaccgcacggcgtctatttctccggacgtcaacgatccggcatttcgtaatatcacttttgacgggctggtggcggcttatcgagagtccaccaaagcgctggtggaaggtggcgcggatctgatcctgattgaaaccgttttcgacacccttaacgccaaagcggcggtatttgcggtgaaaacggagtttgaagcgctgggcgttgagctgccgattatgatctccggcaccatcaccgacgcctccgggcgcacgctctccgggcagaccaccgaagcattttacaacagtttgcgccacgccgaagctctgacctttggcctgaactgtgcgctggggcccgatgaactgcgccagtacgtgcaggagctgagtcggattgcggaatgctacgtcaccgcgcacccgaacgccgggctacccaacgcctttggtgagtacgatctcgacgccgacacgatggcaaaacagatacgtgaatgggcgcaagcgggttttctcaatatcgtcggcggctgctgtggcaccacgccacaacatattgcagcgatgagtcgtgcagtagaaggattagcgccgcgcaaactgccggaaattcccgtagcctgccgtttgtccggcctggagccgctgaacattggcgaagatagcctgtttgtgaacgtgggtgaacgcaccaacgtcaccggttccgctaagttcaagcgcctgatcaaagaagagaaatacagcgaggcgctggatgtcgcgcgtcaacaggtggaaaacggcgcgcagattatcgatatcaacatggatgaagggatgctcgatgccgaagcggcgatggtgcgttttctcaatctgattgccggtgaaccggatatcgctcgcgtgccgattatgatcgactccagtaaatgggacgtcattgaaaaaggtctgaagtgtatccagggcaaaggcattgttaactctatcagcatgaaagagggcgtcgatgcctttatccatcacgcgaaattgttgcgtcgctacggtgcggcagtggtggtaatggcctttgacgaacagggacaggccgatactcgcgcacggaaaatcgagatttgccgtcgggcgtacaaaatcctcaccgaagaggttggcttcccgccagaagatatcatcttcgacccaaacatcttcgcggtcgcaactggcattgaagagcacaacaactacgcgcaggactttatcggcgcgtgtgaagacatcaaacgcgaactgccgcacgcgctgatttccggcggcgtatctaacgtttctttcagcttccgtggcaacgatccggtgcgcgaagccattcacgcagtgttcctctactacgctattcgcaatggcatggatatggggatcgtcaacgccgggcaactggcgatttacgacgacctacccgctgaactgcgcgacgcggtggaagatgtgattcttaatcgtcgcgacgatggcaccgagcgtttactggagcttgccgagaaatatcgcggcagcaaaaccgacgacaccgccaacgcccagcaggcggagtggcgcagctgggaagtgaataaacgtctggaatacagcctggtcaaaggcattaccgagtttatcgagcaggataccgaagaagcccgccagcaggctacgcgcccgattgaagtgattgaaggcccgttgatggacggcatgaatgtggtcggcgacctgtttggcgaagggaaaatgttcctgccacaggtggtcaaaagcgcgcgcgtcatgaaacaggcggtggcctacctcgaaccgtttattgaagccagcaaagagcagggcaaaaccaacggcaagatggtgatcgccaccgtgaagggcgacgtccacgacatcggtaaaaatatcgttggtgtggtgctgcaatgtaacaactacgaaattgtcgatctcggcgttatggtgcctgcggaaaaaattctccgtaccgctaaagaagtgaatgctgatctgattggccttagcgggcttatcacgccgagcctggacgagatggttaacgtggcgaaagagatggagcgtcagggcttcactattccgttactgattggcggcgcgacgaccagtaaagcgcacacggcggtgaaaatcgagcagaactacagcggcccgacggtgtatgtgcagaatgccagccgtaccgttggtgtggtggcggcgctgctttccgatacccagcgtgatgattttgtcgctcgtacccgcaaggagtacgaaaccgtacgtattcagcacgggcgcaagaaaccgcgcacaccaccggtcacgctggaagcggcgcgcgataacgatttcgcttttgactggcaggcttacacgccgccggtggcgcaccgtctcggcgtgcaggaagtcgaagccagcatcgaaacgctgcgtaattacatcgactggacaccgttctttatgacctggagcctggccgggaagtatccgcgcattctggaagatgaagtggtgggcgttgaggcgcagcggctgtttaaagacgccaacgacatgctggataaattaagcgccgagaaaacgctgaatccgcgtggcgtggtgggcctgttcccggcaaaccgtgtgggcgatgacattgaaatctaccgtgacgaaacgcgtacccatgtgatcaacgtcagccaccatctgcgtcaacagaccgaaaaaacaggcttcgctaactactgtctcgctgacttcgttgcgccgaagctttctggtaaagcagattacatcggcgcatttgccgtgactggcgggctggaagaggacgcactggctgatgcctttgaagcgcagcacgatgattacaacaaaatcatggtgaaagcgcttgccgaccgtttagccgaagcctttgcggagtatctccatgagcgtgtgcgtaaagtctactggggctatgcgccgaacgagaacctcagcaacgaagagctgatccgcgaaaactaccagggcatccgtccggcaccgggctatccggcctgcccggaacatacggaaaaagccaccatctgggagctgctggaagtggaaaaacacactggcatgaaactcacagaatctttcgccatgtggcccggtgcaagcgttagcggttggtacttcagccacccggacagcaagtactacgctgtagcacaaattcagcgcgatcaggttgaagattatgcccgccgtaaaggtatgagcgttaccgaagttgagcgctggctggcaccgaatctggggtatgacgcggactgattcacaaatctgtcacttttccttacaacaaacagggcgctcaatgagtgccctgtctctttattaatatgaaacacttatactggaaacaggctggaataatcttagccggaaaaacgaatgtcaaaaggcacagtaaagatgccagtcagcgtgtttccggtcctttggtcattcaattgcttcaggaacatataacgataaggagaacctgaactcgtgttaacgctgcttcacctgctttctgccgtcgccctgctggtctgggggactcatattgttcgaaccggcgtaatgcgcgtcttcggcgcgcgtttgcgtactgtccttagccggagcgtcgaaaaaaagccgctcgccttttgcgcggggatcggcgttaccgcactggtacagagcagtaatgccaccaccatgctggtgaccagctttgtcgctcaggatctggtagccctcgcaccggctctggtcattgtgctgggtgcagatgtcgggacggcgctaatggcgcgtattctcaccttcgacttatcctggctgagtccgttacttatttttatcggcgtgatttttttcctcggacgcaaacagagtcgcgccgggcaactgggccgcgtcggtattggtcttgggctgattttgctagcgctggagttgattgtgcaggccgtaacgccgatcacccaggcaaacggcgttcaggtgatctttgccagcctgaccggcgatattctgctggatgcgctgattggcgcgatgttcgccattatcagctactccagccttgctgctgtactgctgaccgcgactctgaccgccgcaggcattatctccttccccgtggcgctctgtctggtgattggtgctaacctcggttccggtctgctggcaatgctcaacaacagtgccgccaatgccgcagcccgccgtgtcgcgctgggtagtctgctgtttaagctggtgggtagcctgattatcctgccgtttgtccatttgctggcagagacaatggggaagttgagtttgccaaaagcggaactggtgatctatttccacgtcttctacaaccttgtacgttgcctggtcatgctgccatttgttgacccgatggcacggttttgcaaaacgattattcgcgatgaaccggaactggatacccagctacggcctaaacatctggatgtcagcgcgctggatacgcccacgcttgctctggcgaacgccgcgcgcgaaaccctgcgcattggcgacgccatggaacagatgatggaagggttgaataaagtgatgcacggtgagccacggcaggagaaagagctgcgtaagctggcagatgatatcaacgttctctacaccgccattaagctgtatctggcgcggatgccaaaagaagagctggcggaggaagagagccgccgctgggcagagatcatcgaaatgagcctcaaccttgaacaggcctccgatatcgtcgagcgcatgggcagcgaaattgctgacaaaagtctggcagcacggcgggcatttagccttgatgggttgaaggaactggatgcgctctatgagcaattgctcagtaatttaaagctggcaatgagcgtgttcttctctggcgatgtcaccagcgctcgtcgtttgcgtcgcagcaaacatcgttttcgcattcttaatcgccgctattcccacgcccacgtcgatcgcctgcatcagcaaaacgtgcagagcattgaaaccagtagcctacatttaggcttactgggagatatgcagcgcctgaacagcctgttttgtagcgtggcttacagtgtgctggaacagccggatgaagatgaaggacgggacgagtattaatattgtgaatcctgtaggcctgataagacgcgtcaagcgtcgcatcaggcactatgaacaagatgccggatcatgcatccggcaattcacttaaaaacggtgaccagcttccagcggaaccgcttcttcaccagccttaaacacataagtggtgttcgggccacccagcgtagcgtgacctttactcactgtgatccagttaccttccggtagaccaataatcgtcagttctggcgcgacgaccagcagttcgcgaatacgctgctcacgggtttcacctttatggccttccggcagcgcgttggtgaagtgcgggttgatttgcagcgggaacagatttagcgcatcgaaaccttgcggatcgacaatcggcatatcgttggtggtacgaatagttgggcaagcaaggttagcgcctgcgctccagccaatatacagagcgccacgtttaaccacgtcagtaattggtgccagcagcccgcgctcgcggcactgtttcagcaactggaaagtattcccgccgccgacaatcacgatctcagcattttcaatcgcggcaacgggatcgacaacgctatgaataccggtgacagaaacacccagcggagcgagaaccgcagccgttttcgctgtgtaatcatcccaggtctgcgttacgccagcgaaagggataaacaccgcactgcggcgaccctgcaactgttcagcaattagcggcagtgcatgttccagccaggctttacccggcagcgtgctgttactcaataaaagcagttccattacttctccggttagtaagaaatcacgggaggcatgctaccactgcgaatttaaccacttactgacatggctcacgatgtcgcacattgcttctggaaagtgatttgagcaggtaacgaattcaagccaatggaaataacaaatagttcgctcatgactattttttatcaacccaaaggtacggtatattccgttttttacaggagaatttatgctgcccgacagtagtgtccgtttaaataaatacatcagcgaaagcggaatttgcagtcgccgcgaagcggatcgctatatcgagcaaggcaatgtgttccttaatggcaagcgagccaccattggcgatcaggtgaaacccggcgacgttgtgaaagtaaacggtcagttgattgaacctcgggaagccgaagatttggtacttatcgccctgaacaagcccgttggtattgtaagcaccaccgaagatggcgagcgcgataacattgtcgatttcgttaaccacagcaaacgcgtgttcccgattggccgcctggataaagactcccaggggctgattttcctcaccaatcacggcgatctggtgaataagatcctgcgtgctggcaatgatcatgagaaagagtatctggtgacggtcgataaaccgattaccgaggagtttattcgcggcatgagtgcgggggtgccaatcctcgggacagtgaccaaaaagtgcaaagttaaaaaagaagcgccgtttgtcttccgcattaccctggtgcaggggctgaaccgtcagatccggcgcatgtgcgagcatttcggctatgaagtgaaaaagctggaacgcacgcgcatcatgaacgttagcttaagcggcattccgctgggggaatggcgcgatttaaccgacgatgagttaatcgacctctttaagctcattgaaaattcctcttccgaggtaaaacctaaagcgaaggccaaaccgaaaacagcgggcatcaaacgtccagtcgttaagatggaaaaaacggcggaaaaaggcggtcgcccggcgtccaacggtaagcgttttaccagcccggggcgtaaaaagaaggggcgctgattaacgcctcagactgatgaaaacggcccaaaagtgcccggacagtcccctcgccccttcgggaaaagggttagggtgaggggaaaattgtgttcacactgacgagtgaaaatctcaggcgttgattgtggattagcgcctgccgcgcgtgctcgtatttgcactccagctaaaactcgcttcaggatccggtttataagcctgctttttcttcaactggcgggcttttttcgcttcagcctcacgctcaaccattaatttatcgatgtaatctttcttaatgctgttggtttcggagttggtcaatacgcgaccatgcgcaatccgcgcccgatccagcagtgttttaagttcacgctgctcgcgttcagtcatctctttttgggtaatacgggggagtgccatgatggtgccctcagtgagccagagagttcagtgtacgggaattcgtttgcgagcagaactgataatattcattttgccttctcttaactatttatctctttcgataattaattagagatgcagataaaaaaattaaaggcaattattctccgataaagacgctggttaacagagtacaggctcgtttattgatgagcatagtgacaagaaaatcaatacggcccgaaatatagcttccaggccatacagtatttactcaaacaaattactatgcagtttttgcaccacctgctcggcatcttcgccgggcaccaggaagcacaggttatggctggatgcgccataacaaatcatgcgaatgttgaacggttccagtacgccgaatacctctttgccaacgccgcaggctttactcaggtcattgccaatcaacgcgaccagcgccagaccttcttccacctccacccgacacagtgcggaaagctccatcagcagagattgcgtcagcaacgtatcgccagtggaggtactaccggtggtatcaagggttaatgccacgctcacttcactcgtggtgattaagtctacgctaatattatgccgcgcgaggatgccgaaaacttccgcgaggaaaccgcgagaatgcagcatattcaggctgtgcaaagtgagcagagtctgattgcgacgaagcgccagagcgcggaacagcggcggattttcagttttattgcacaccagcgtaccacctgcgcgtgggtctttgctggagccgacaaagaccgggatatcgctgcgtactgcgggtagcaacgttgccggatgcagtacttttgcaccaaaagttgccatctctgccgcttcggcaaacgcgatttcatcaatgcgttttgctgcggaaactacgcgtggatcggtggtgtagatgcccgggacgtcggtccagatatcaacacgagatgcgtgtaaagcctccgccagcaaggctgccgtataatcgctgcctccacggccaagcgtcgttgtacgacctttattttcgctaccgataaatccctgggtgatcactaagccttcattgagacgtgggagcagctgcagcgcggccagttccgccagcgcggctatatctggctctgcacgaccaaatcggtcgttggtacgcatcactttacgtacatcaaaccactgtgcctgaacatcgcgttcgcgcaggatctcaacaaacagcagggtgctcatcagctcgccgtggctgaccagctcatctgtcagcgccggagacgttgccagcgccgccgcttctgccagaacagtaatgttctccagcagacgttcaatctcttcacggataacgttcgggtaacgcagacgttccagaatggcaaactggatgttgcggatagcgtcgagtttttcgaatcgctcgccaggttccagtccttcagctaaagcgaccagcagattagtgataccagcagaagcgctgaggacaactaaacgcacgttggcatcagaaagcacaatatcagcgctgcggttcatggcgtcaaaatcagctacgctggtaccgccaaatttggagacaacaatttcagacataactacctcgtgtcaggggatccattttcagccttggcacaagggaagagcggaagacgggtgggcgcagagcgatacttcgctactattttcacccagaagtgctccaccacttgcgaaacgcccgactgcgaacgcttctggtgacaacccaggggattcagcccctgtagccgatgatgaacgtggccagccgttcaatcacctcggcgatgcaccccctcaggtgttatcacaggactggctcctccaacaccgttacttgggcaacgcgcctcttctggcctgcgctagcgcaggtagtacatttataaataaagggtgagcggggcggttgtcaacgatggggtcatgcggatttttcatccactcctggcggtcagtagttcagctaataaatgcttcactgcgctaagggtttacactcaacattacgctaacggcactaaaaccatcacatttttctgtgactggcgctacaatcttccaaagtcacaattctcaaaatcagaagagtattgctaatgaaaaacatcaatccaacgcagaccgctgcctggcaggcactacagaaacacttcgatgaaatgaaagacgttacgatcgccgatctttttgctaaagacggcgatcgtttttctaagttctccgcaaccttcgacgatcagatgctggtggattactccaaaaaccgcatcactgaagagacgctggcgaaattacaggatctggcgaaagagtgcgatctggcgggcgcgattaagagcatgttctctggcgagaagatcaaccgcactgaaaaccgcgccgtgctgcacgtagcgctgcgtaaccgtagcaataccccgattttggttgatggcaaagacgtaatgccggaagtcaacgcggtgctggagaagatgaaaaccttcagtgaagcgattatttccggtgagtggaaaggttataccggcaaagcaatcactgacgtagtgaacatcgggatcggcggttctgacctcggcccatacatggtgaccgaagctctgcgtccgtacaaaaaccacctgaacatgcactttgtttctaacgtcgatgggactcacatcgcggaagtgctgaaaaaagtaaacccggaaaccacgctgttcttggtagcatctaaaaccttcaccactcaggaaactatgaccaacgcccatagcgcgcgtgactggttcctgaaagcggcaggtgatgaaaaacacgttgcaaaacactttgcggcgctttccaccaatgccaaagccgttggcgagtttggtattgatactgccaacatgttcgagttctgggactgggttggcggccgttactctttgtggagtgcgattggcctgagcattgttctctccatcggctttgataacttcgttgaactgctttccggcgcacacgcgatggacaagcatttctccaccacgcctgccgagaaaaacctgcctgtactgctggcgctgattggcatctggtacaacaatttctttggtgcggaaactgaagcgattctgccgtatgaccagtatatgcaccgtttcgcggcgtacttccagcagggcaatatggagtccaacggtaagtatgttgaccgtaacggtaacgttgtggattaccagactggcccgattatctggggtgaaccaggcactaacggtcagcacgcgttctaccagctgatccaccagggaaccaaaatggtaccgtgcgatttcatcgctccggctatcacccataacccgctctctgatcatcaccagaaactgctgtctaacttcttcgcccagaccgaagcgctggcgtttggtaaatcccgcgaagtggttgagcaggaatatcgtgatcagggtaaagatccggcaacgcttgactacgtggtgccgttcaaagtattcgaaggtaaccgcccgaccaactccatcctgctgcgtgaaatcactccgttcagcctgggtgcgttgattgcgctgtatgagcacaaaatctttactcagggcgtgatcctgaacatcttcaccttcgaccagtggggcgtggaactgggtaaacagctggcgaaccgtattctgccagagctgaaagatgataaagaaatcagcagccacgatagcagcaccaatggtctgattaaccgctataaagcgtggcgcggttaatcatcgtcgatatgtaggccggataaggcgttcacgccgcatccggcaaccgatgcctgatgcgacgcggtcgcgtcttatcaggcctacaggtcgatgccgatatgtacatcgtattcggcaattaatacatagcacgattgattaaataaccttaataacaatgccgacgttatgtcggcatttttttatcagataaatccccttgtctgtaatttaacggaaatcataccgtgaggttaatcctaaaatagatttttaatcgttgtttatttcggaaaatacgcagattaattgcttttgtttttattttaagtttatgatttttattgttatttaaatataagttgaaacttatatttgatattcattccaattatcctaaaacgccatcgctaattccccgcgccgtaattcgcatgctttagttgtgtatactcgatcccgcccgaaatgtttttgggtaaatctccattcattcaatgaagggaaattgttatgaaaaaagttctgtatggcatttttgccatatctgcgcttgcggcgacttctgcgtgggctgcacctgtacaggtgggcgaagcggcagggagcgcagcaacgagcgttagcgcggggagttcctccgcgaccagcgtcagcaccgtaagcagcgcggtgggtgtcgcgcttgcggcaaccggtggcggtgatggttctaataccgggaccaccacaaccacgaccaccagtacccagtaataaagtatgtatccccaaaataattcgagtcattgcatctgtggctagaagtatgaagggattaaccataaccacactccggtgtggttattctgcccctctggagaagagtcgtgaagcgacctgcactcattcttatctgcctgttattacaggcctgtagtgccacgactaaagagctgggcaatagtctgtgggacagtctgttcggcacgccaggcgtacagctgacggatgatgatattcaaaatatgccctacgccagccagtacatgcagcttaatggcgggccgcagttatttgtggtgctggccttcgctgaagacggacaacaaaaatgggtcactcaggatcaggctactctcgttacccaacatggccgtctggtgaagactctgctcggcggcgacaacctgattgaagtgaataaccttgctgccgacccgctgattaaacccgcacaaatcgttgatggcgcaagctggacgcgcacgatgggctggaccgagtaccagcaggtacgctacgccaccgcacgcagtgtcttcaaatgggatggcaccgataccgtcaaagtcggcagcgatgaaaccccggttcgcgtgctggacgaagaagtctccaccgaccaggcgcgctggcataaccgctattggatcgacagcgaagggcaaattcgccagagcgaacagtatctcggcgcggattattttccggtgaaaaccactctcatcaaggcggcaaaacaatgattaaacaaactattgtcgcgttgcttttgagtgtgggagcgagtagcgtcttcgcggcaggaaccgtcaaggtgttcagcaatggcagcagtgaggccaaaacgctaacgggcgcagagcatttaatcgatctggtaggccaaccgcggctggcaaacagctggtggcccggtgcggtgattagcgaagagctggcaacggcggcagcattgcgtcagcagcaggcgttgctgacacggctggcagaacagggcgcagattccagcgccgacgatgccgctgcgattaacgccttacgccagcaaattcaggcgttgaaagtgacgggcaggcaaaaaatcaatcttgatcccgatatcgtccgcgttgccgaacgcggtaacccgccgttgcagggcaactacacgctgtgggtcggaccaccgccgtccacggtcacgttgttcgggcttatcagccgtcctggcaagcagccattcactccaggtcgcgacgtggcgagctatctctctgaccagagcctgctcagcggtgcggatcgcagctacgcgtgggtggtttacccggacggacgcacgcaaaaagcgccggtggcttactggaacaagcgtcacgtagagccgatgcccggcagcattatttatgttggcctcgcggactccgtctggagtgagacgcctgatgcccttaacgccgacattcttcagactctgacgcagcggatacctcaataatgaaaaaaagacatctgcttagcttactggcgctgggcattagcacagcttgctacggcgaaacatatcctgcgcccattggtccgagccagagcgatttcggtggcgtaggattattacaaacgcccaccgcgcgtatggcacgggaaggggagttgagtctgaactatcgcgataacgatcagtaccgttattacagtgctagtgtgcaactcttcccgtggctggaaacaacgctgcgctacaccgacgtgcgcacccggcagtacagcagcgtcgaagcgttctctggcgatcaaacgtataaagataaagccttcgatctcaaactgcgtttgtgggaagagagttactggctgccgcaagtggcggttggtgcgcgggatatcggcggtacggggctgtttgatgcggaatatcttgttgccagcaaagcctgggggccgttcgattttacgctcggcctgggctgggggtatttgggcaccagcggtaatgtgaaaaatccgctctgtagtgccagtgataaatattgctatcgcgataacagctacaaacaggcgggatctatcgacggtagccagatgttccacggtcctgccagtctgtttggcggcgtggaataccagacgccctggcaaccgctgcgcctgaaactggagtatgaaggcaataattatcagcaggattttgccgggaagctggagcaaaaaagtaagtttaacgtcggtgcgatttatcgcgttaccgattgggccgacgttaaccttagctatgaacgtggcaacacctttatgtttggcgttacgttgcgcaccaactttaacgatctgcgcccgtcttacaacgataacgcccgcccgcaatatcaaccgcagccgcaggatgccattttgcagcatagcgtggtggcgaatcagttaacgctgttgaaatacaatgccggacttgccgatccacagatccaggcgaaaggcgatacgctgtatgttaccggcgagcaggtgaaatatcgtgatagccgcgaagggatcatccgtgcgaatcggatcgtgatgaacgatctgccggatgggatcaaaacgatccgcattacggaaaatcgccttaacatgccgcaggtgacgacggaaaccgatgtcgccagcctgaaaaatcatctcgccggagagccgttgggccacgaaacgacgctggcgcaaaaacgcgtcgagccagtggttccgcagtccaccgagcagggctggtatatcgacaaaagtcgctttgatttccatatcgatccggtgctgaaccagagcgtcggtggcccggaaaacttttacatgtatcagctgggcgtgatgggaacggcagatttgtggctgacggaccatctgctgaccaccggcagcctgtttgcaaatcttgccaacaactacgacaagtttaactacactaatcctccgcaggacagccacttaccgcgcgtgcgtacccatgtgcgcgagtatgtgcagaacgatgtctatgtgaataacctgcaagccaactacttccagcatctgggcaacggcttctacggtcaggtctacggtggttatctcgaaaccatgtttggcggtgcgggggcagaagtgttgtatcgcccgctggacagcaactgggcgtttggtctggatgccaactacgttaaacagcgcgactggcgtagtgcaaaagatatgatgaaattcaccgactacagcgtgaaaaccggacatctgaccgcctactggacgccatctttcgctcaggatgtgttagttaaagccagcgtcgggcagtatctggcaggggataaaggcggcacgctggagatcgccaaacgctttgatagcggcgtggtggtgggtggctatgccacgatcactaatgttagcaaagaggagtacggcgaaggggacttcaccaaaggcgtgtatgtcagcgtaccgttggatctcttcagctctggcccgacacgcagccgtgcggcgattggctggacgccgctgacgcgtgacggtggtcagcaacttgggcgtaagttccagttgtatgacatgaccagcgaccgtagcgtcaatttccgctaagtcatgggaaaggtgccagttttcgcactcactggcaccttcattcttaatggcctgtcgagccatcaggaacgcagttcactcccggtttgcgatctggtgtgtaaaggcgaaaacattctgtcttcctgtccgtcgatatcggttgcaggtctggttgcctgagcgactgggccatcattgggctggagacattgctttgcggtaggtcggctttatcagcagtaccgagcggaccagcataagcaggaagaacagagactgataacatcaaagcagcaaaataaggcttcatttttaccacctttatcaggttacgtttcatttgttccagaggaacattgtcgatttttcgcgcattgctggtggctgggaatcacctgaatgggtgatttttgaattaccggctttggtgcggtttgtcttgccggatgcgccgccaggcgcggcttatccggcctacgggtaggtatatccggctttggtggaggcgcgctccaaatccaggttgaacaaaacatacacaaaaaatatagatctccgtcacatttttgcgttatacaggaagctcgccactgtgaaggaggtactgctatgacgagtctctctcgtccgcgcgtggagtttatctccaccattttgcagaccgtactcaatcttggcctgctgtgcctcggcctgattttggttgtcttcctcggcaaagaaacggtgcatctggctgatgtgctgttcgcgccagaacaaaccagcaaatatgagctggtagaaggactggtggtttactttctctatttcgaatttatcgcgctgattgtgaagtactttcagtccggttttcacttcccgctacgttactttgtctatattgggatcaccgccattgtgcgcttgatcatcgtcgatcataaaagcccactggatgtgttgatctacagcgctgcgatcctgttactggtgatcaccctgtggctgtgtaatagcaaacggctgaagcgggagtaaaaagtcagcacgccgaaatggcgcggcgtgctggacaggaagattacagcgtagcagtttgttgtgttttcttcgtttccggttcccagagcgcttccagctcctcaagggttttacctttggtttccgggacaaatttccacataaacagtgctgccagaacgcccatacaaccgtaaatccagtaggagaaaccgttgtggaaatgggccaccagccaggagtttttgtccatcatcgggaaggtccaggagacgaagtagttcgccagccactgggccgccaccgcgattgccagcgctttaccacgaatagcattcgggaagatttcgctcagcagtacccagcataccggaccccaggacatggcaaaggcggcaacatagaacagcatgctcagtagcgccacaatacccggtgcctgagtgtaaaacgcggtaccgaggctaaacataccgattgccattccgagtgcgccgataatttgcagtggcttacgaccaaatttatccaccgtcataattgccagaacggtgaaggtgaggttgataactccgacaataatggtctgcaacagcgcgatatccgtgctggcccccagcgttttgaacacttccggcgcgtagtacagcaccacattgatgccgacaaattgctggaagatggagagcattacgccgattacaatcacgcccacgccaaacatcagcagacgaccaccggttttgcggccatgatccagggagtgtttaatttcctgtactgcctgagttgcaagcgtgttgcccataattttgcgcaggataccttccgcctgttcttgcttgccgcggctcatcagccagcgaggactttctggcacggtatacagcagcattaagaacagcagtgcagggatacattcgctggcaaacatataacgccagccgtcagtattcagccagctggcatcaccggaacgggcaataaaatagtttacgcagtaaactaaaagttgcccgaaaataatcgcaaactggttaaaagagaccagtttcccgcgaatatgagctggagccagttccgcaatatacattgggctgagcatactggctaaaccaacgccaataccgccaataatgcgataaataacaaattccgggacataacctgccagataaacaggcacagtgttgtccgggtttatagaggtaaaaccaagttctggccaggcagaacctacaccagaaataaaaaacaggacagcagcaatcttaagactatcacgacgaccgaagcggttactgcaataaccaccgagggcaccgccgatgatgcaaccaatcagagcgctggccacgcaaaaccctaacagggagttggcagcggattcacttaagttttgtggagcaacaaagacggtattgagactctcaacagtaccggaaataacggcggtgtcgtagccaaataataaaccacctaatgtagcgactaaggtaatgctaaatatataactggaattatactgggtattcattcagacctgccttagaccattctgatcttttatcagtgcattgatgttggaattgtcaggcagttaaggcaattatcattttttacaatgcgtttacgtaatgtcttttctgtgatcttaattgtgataattatccaaaattgataaaaacaatactattgccgtgactcagagcacgaaagagaattatcgtaagtgggaaaacaaataacgtaaaaataataagctctatgatggaaatattaaccggcgaacgattcagattgcagacgaaagaaaaaaaggcgctccgtggagcgccgaataacagtcacaagttgggataacgtaagttgagggtgcagcggcataacattggcagaacaacatctttaacctttcacaccacctgccgtcaggccgttgaccagccagcgttgagccagcaagaagacgatggtgatcggtaatgcagacatcacggcagcggcggcaaagtcaccccacaggtagttttgcgggttgaggtattgctgcatccccacggccagggtgtagctgtttacgtcacgcagtaacaggctcgcgaccggaacttcagtaatggcagcgataaagctcaggatgaataccaccgccagaatcggtacactcagcggcaacaggacaaggcggaaggcctgccacggtgtcgcaccatccagcgcagcagcttcttccaggctactgtcgatggtttcgaaatagcctttgatggtccagacatgcagcgcaatcccacccagatacgcgaaaattacgccgccgtgagtattcaggccaatgaatggaatgtactcacccagacgatcaaacaacgcatacaacgcgaccagactaagtactgccgggaacatctggaaaatcagcattcctttcagcagcgtcgctttgcctggaaagcgcatacgggcgaaagcgtaggcgcaggtggtggagagcgccacaatgccaatcgcggaaatcccggcgacctttacgctgttccacagccacagcagtaccgggaatggcggtggcgtaatgcgaccatcagcctgttcaacgctaaaacctaacgccagtttccagtgatcccaggagatttgctccgggatcaggctgccggtcgcaaagtttccctgacgcaggctgatagcgacgaccatcagcagcgggaacataatcgctgcgataaaaagtagcagtagcaggtgagtaataaataaacgagctttttggcttttcggttggaccattgccatttttgttatctcccttaatcaaacttcattcgcgtggctttcaggttcactatcgccagcgcacccaccagcaggaagatcagcgtggcaattgctgccgccagaccgaagtcctgacccccgccgccttcaaaagcgatgcggtaggtgtagttaacaagcaggtcggtataaccggctggcgtggtcgtgccaagacgatccgggccgccgttggttaacagttgaatcagcacgaagttgttaaagttaaaggcgaagctggcgatcatcagcggcgtcagcggtttaatcagcagcggcagcgtaatcttaaagaagttctggaacggacctgcgccatccattgcactggcttcatacaaatcgtccggaatcgctttcagcaagcccatgcagaggatcatcatgtacggataacccagccaggtattgacgataattagcatcgtgcgggcggtggtcggatcgctgaaccaggcgggcttcacgccaaacagcgcgctcaacatcatgttgatttcaccgaagctctggttaaacaaccctttgaaaatcaagatactaatgaagcttggcaccgcgtagggcagaatcagcaggacgcgatagaccgctttgccgcgcaacgcttcccactgcaccagacacgccagaaccatgccgaccgccaccgttaaaaagacagtgatcaggctgaacaccacggtccagacgaaaatggcgaggaacggtttctgaatgccttcgtcggtaaagacgcgggtaaagtttttccagccggtggtcacggtgtaaccggggcttagcttttcatcaccccagttgccgtcggcggtaatggactggtaaaagccaatttggttattcggacgatatttcacgccgctctgattattcgtcaacgtgccgtcaccgtcgagtgtgtagagcggctgcgtgccagaaaactggcgcagggagctcatcatcactttgttgccatccggcagaatggcggtaatgtcactcagcgcctgacgattctgggtaatcacgcgcagattcgcgcgttcgccttcgggctgggcggtcgtttctttcagttgcagtttttgctcgccgccaaatttaaaagcgtcggagaggtaatttttgccggtttcgccgtcgctgagcgccagttgccactcatcgcccgccgggtaaagaccaaagttataggttttgcctgcttgccaggagcgatctaacaacacttcctgcgcacgttcaaaagtcagctggttagtgctgctgtagttggtgaaggcaatggcgatggtgcagaccagagggaagaggacgaataatcccattccagccattcccgggtaaacatagcgccaggcgtaggctttacgattggcgaaaatatacagccccgcactactcaatatcagcgtggtaatggcgaacaggtattccccttgtgcgtacattaaaacaacaaggtaacccaccagcaggccgagcagacctagcacactccatttcagcgcgtcgctttgccaccaatgtttctttttaatgacatccatggggttcttcctcattccaggacggataaggctttcacgccttatccgacaacaactgcctgatgcgacgctgacgcgtcttatcaggcctacatacgtttcggttttgtaggccggacaaggcgttcacgccgcatccggcatttcacagcattacttggtgatacgagtctgcgcgtctttcagggcttcatcgacagtctgacgaccgctggcggcgttgatcaccgcagtacgcacggcataccagaaagcggacatctgcgggatgttcggcatgatttcacctttctgggcgttttccatggtggcggcaatacgtggatctttcgccaactcttcctcgtaagacttcagcgctacggcacccagcggtttgtctttattaaccgcttccagaccttcatcagtcagcagatagttttcgaggaactctttcgccagctctttgttcggactggcggcgttaatacctgcgctcagcacgccaacgaacggtttggatggttgacccttgaaggtcggcagtaccgttacaccataattcactttgctggtgtcgatgttggaccatgcccacgggccgttgatggtcatcgctgtttcgcctttattaaaggcagcttctgcgatggagtaatcggtgtctgcattcatgtgtttgtttttaatcaggtcaaccaggaaggtcagacccgctttcgcgccagcgttatccacgcccacgtctttaatgtcgtacttgccgttttcatacttgaacgcataacccccgtcagcagcaatcagcggccaggtgaagtacggttcttgcaggttgaacatcagcgcgctcttacctttcgctttcagttctttatccagcgccgggatctcttcccaggtttttggcgggttcggcagcagatctttgttataaatcaggcttaacgcttcaacagcgatcgggtaagcaatcagcttgccgttgtaacgtacggcatcccaggtaaacggatacagcttgtcctggaacgctttgtccggggtgatttcagccaacaggccagattgagcgtagccaccaaagcggtcgtgtgcccagaagataatgtcagggccatcgccagttgccgcaacctgtgggaatttctcttccagtttatccggatgctcaacggtgactttaattccggtatctttctcgaatttcttaccgacttcagcgagaccgttatagcctttatcgccgttaatccagattaccagtttaccttcttcgattttggcgagagcgctggcggaaaacatcatcgtcgttaatgcggataatgcgaggatgcgtgcacctgtttttattttcataatctatggtccttgttggtgaagtgctcgtgaaaacacctaaacggactctagtttctttatacggcaacctctttccatcctccttgcccctacgccccaccgtcgctttgtgtgatctctgttacagaattggcggtaatgtggagatgcgcacataaaatcgccacgatttttgcaagcaacatcacgaaattccttacatgacctcggtttagttcacagaagccgtgttctcatcctcccgcctcctcccccataaaaaagccagggggtggaggatttaagccatctcctgatgacgcatagtcagcccatcatgaatgttgctgtcgatgacaggttgttacaaagggagaagggcatggcgagcgtacagctgcaaaatgtaacgaaagcctggggcgaggtcgtggtaagcaaagatatcaatctcgatatccatgaaggtgaattcgtggtgtttgtcggaccgtctggctgcggtaaaagcactttactgcgcatgattgccgggcttgagacgatcaccagcggcgacctgttcatcggtgagaaacggatgaatgacactccgccagcagaacgcggcgttggtatggtgtttcagtcttacgcgctctatccccacctgagtgtagcagaaaacatgagttttggcctgaaactggctggcgcaaaaaaagaggtgattaaccaacgcgttaaccaggtggcggaagtgctacaactggcgcatttgctggatcgcaaaccgaaagcgctctccggtggtcagcgtcagcgtgtggcgattggccgtacgctggtggccgagccaagcgtatttttgctcgatgaaccgctctccaacctcgatgctgcactgcgtgtgcaaatgcgtatcgaaatctcccgtctgcataaacgcctgggccgcacaatgatttacgtcacccacgatcaggtcgaagcgatgacgctggccgacaaaatcgtggtgctggacgccggtcgcgtggcgcaggttgggaaaccgctggagctgtaccactatccggcagaccgttttgtcgccggatttatcggtagcccaaagatgaacttcctgccggtaaaagtgaccgccaccgcaatcgatcaagtgcaggtggagctgccgatgccaaatcgtcagcaagtctggctgccagttgaaagccgtgatgtccaggttggagccaatatgagcctgggtattcgcccggaacatctactgccgagtgatatcgctgacgtcatccttgagggtgaagttcaggtcgtcgagcaactcggcaacgaaactcaaatccatatccagatcccttccattcgtcaaaacctggtgtaccgccagaacgacgtggtgttggtagaagaaggtgccacattcgctatcggcctgccgccagagcgttgccatctgttccgtgaggatggcactgcatgtcgtcgactgcataaggagccgggcgtttaagcaccccacaaaacacacaaagcctgtcacaggtgatgtgaaaaaagaaaagcaatgactcaggagatagaatgatgattactctgcgcaaacttcctctggcggttgccgtcgcagcgggcgtaatgtctgctcaggcaatggctgttgatttccacggctatgcacgttccggtattggttggacaggtagcggcggtgaacaacagtgtttccagactaccggtgctcaaagtaaataccgtcttggcaacgaatgtgaaacttatgctgaattaaaattgggtcaggaagtgtggaaagagggcgataagagcttctatttcgacactaacgtggcctattccgtcgcacaacagaatgactgggaagctaccgatccggccttccgtgaagcaaacgtgcagggtaaaaacctgatcgaatggctgccaggctccaccatctgggcaggtaagcgcttctaccaacgtcatgacgttcatatgatcgacttctactactgggatatttctggtcctggtgccggtctggaaaacatcgatgttggcttcggtaaactctctctggcagcaacccgctcctctgaagctggtggttcttcctctttcgccagcaacaatatttatgactataccaacgaaaccgcgaacgacgttttcgatgtgcgtttagcgcagatggaaatcaacccgggcggcacattagaactgggtgtcgactacggtcgtgccaacttgcgtgataactatcgtctggttgatggcgcaagcaaagacggctggttattcactgctgaacatactcagagtgtcctgaagggctttaacaagtttgttgttcagtacgctactgacagcatgaccagccagggtaaagggctgagccagggttctggcgttgcatttgataacgaaaaatttgcctacaatatcaacaacaacggtcacatgctgcgtatcctcgaccacggtgcgatctccatgggcgacaactgggacatgatgtacgtgggtatgtaccaggatatcaactgggataacgacaacggcaccaagtggtggaccgtcggtattcgcccgatgtacaagtggacgccaatcatgagcaccgtgatggaaatcggctacgacaacgtcgaatcccagcgcaccggcgacaagaacaatcagtacaaaattaccctcgcacaacaatggcaggctggcgacagcatctggagtcgcccggctattcgtgtcttcgcaacctacgccaagtgggatgagaaatggggttacgactacaccggtaacgctgataacaacgcgaacttcggcaaagccgttcctgctgatttcaacggcggcagcttcggtcgtggcgacagcgacgagtggaccttcggtgcccagatggaaatctggtggtaatagcaaaacctgggccggataaggcgtttacgccgcattcggcaaccaacgcctgatgcgacgcttgcgcgtcttatcaggcctacaacggctgtcaaatgtaggccggataaggcgtttacgccgcatccggcataaaaacaggttgtcattatctgaaaggggcgaaagcccctctgattatcgggtttagcgcgctattgcctggctaccgctgagctccagattttgaggtgaaaacaatgaaaatgaataaaagtctcatcgtcctctgtttaagtgcagggttactggcaagcgcgcctggaattagccttgccgatgttaactacgtaccgcaaaacaccagcgacgcgccagccattccatctgctgcgctgcaacaactcacctggacaccggtcgatcaatctaaaacccagaccacccaactggcgaccggcggccaacaactgaacgttcccggcatcagtggtccggttgctgcgtacagcgtcccggcaaacattggcgaactgaccctgacgctgaccagcgaagtgaacaaacaaaccagcgtttttgcgccgaacgtgctgattcttgatcagaacatgaccccaagtgccttcttccccagcagttatttcacctaccaggaaccaggcgtgatgagtgcagatcggctggaaggcgttatgcgcctgacaccggcgttggggcagcaaaaactttatgttctggtctttaccacggaaaaagatctccagcagacgacccaactgctcgacccggctaaagcctatgccaagggcgtcggtaacagcatcccggatatccccgatccggttgctcgtcataccaccgatggcttactgaaactgaaagtgaaaacgaactccagctccagcgtgttggtaggacctttatttggttcttccgctccagctccggttacggtaggtaacacggcggcaccagctgtggctgcacccgctccggcaccggtgaagaaaagcgagccgatgctcaacgacacggaaagttattttaataccgcgatcaaaaacgctgtcgcgaaaggtgatgttgataaggcgttaaaactgcttgatgaagctgaacgcctgggaagcacatctgcccgttccacctttatcagcagtgtaaaaggcaaggggtaattacgccccacagtgctgattttgcaacaactggtgcgtctcctggcgcacctttttttatgcttccttcctgggatatgagcgattttttatagtaactcacttcttcttcactaagaatatccattatctcaatgccttatcagagattcttttcctttcgccggtagtgtctggacattcaggctacttttccaggttattttatttctgttatgcagaggttttatgataagtcatatcctaaattctggcggcaataactctttgatgaaacatgatgtggtgcaaggaaataatatagtagatcttgatttactacgtaatttaaatggggtgccaggtttaaacagagataactttatttatatcagcaatattttttcaaatataaaacaacggaacgaaaaaatcatgcaataaatatgtttcgtgaagtctcaatcagtaatgatactataagtgtaaaattctacagaaatgaaaaaaattgaatgcgcttgcaattttctgatggataaagatgcgcaggggtatatcgacctgtctgatttggatttaacaagttgtcattttaaaggtgacgttataagcaaggtgtcttttttaagtagtaatctacaacatgtaacattcgaatgtaaagaaattggggattgcaattttactactgcaatagttgataatgtcatatttagatgtcgacgtttacacaatgtgatttttatcaaagcgagtggtgaatgtgtcgatttcagcaaaaatattcttgatacagttgacttcagccagagtcaacttggtcatagtaattttcgcgaatgtcagattagaaatagtaacttcgataattgttatctttacgctagccacttcaccagagcagagtttctgtctgccaaagaaataagttttattaaaagcaatttgacagctgttatgtttgattatgtgcgaatgagcacagggaattttaaagattgcattacagaacaattggaattaactattgattatagtgatatattttggaatgaagatctcgatggttatatcaataacattataaaaatgattgatacattgccagataatgcaatgatattgaaatccgttctggccgtaaaactggtgatgcaattaaaaatacttaatattgttaataaaaactttattgagaatatgaagaaaatatttagccattgtccttatataaaagatcccattatacgcagttatatccattctgatgaagataacaagttcgatgattttatgcgtcaacatcgattcagtgaggtgaatttcgatacccaacagatgatcgattttattaacagatttaatacgaataaatggctaattgataaaaataacaatttttttatccaacttatcgatcaggccttacgaagtacggatgatatgatcaaagcaaatgtttggcatctttataaagagtggattcgtagtgatgatgttagtcctatatttatagaaactgaagataatttaagaacctttaacacgaatgaattaacacgaaacgataatatctttatcctgttctccagtgtcgatgatgggccagttatggtggtaagctcccagcgcttacatgatatgttgaatcctacaaaagataccaattggaattccacgtatatctacaaatccagacatgagatgttgcctgttaatcttactcaggaaacacttttcagctccaaatctcatggtaaatatgcgcttttccccatttttactgcgagttggcgagctcatcgtataatgaataagggtgtttaagtaaaggaaaacatcaccgttcctggcatcctggacggtgatgcccctacggttgccctcgccagcacgggcatcggtaaagcgtaaggttcaacatcgttttaccacttcatgcgattgttgcgtttttgttgcgtattagatcacttaatttgctttacatctcccgtaaacacttttctgcgatacaatgcctttacgttatgtaacggagagttcggcatgagtcaccccgcgttaacgcaactgcgtgcgctgcgctattgtaaagagatccctgccctggatccgcaactgctcgactggctgttgctggaggattccatgacaaaacgttttgaacagcagggaaaaacggtaagcgtgacgatgatccgcgaagggtttgtcgagcagaatgaaatccccgaagaactgccgctgctgccgaaagagtctcgttactggttacgtgaaattttgttatgtgccgatggtgaaccgtggcttgccggtcgtaccgtcgttcctgtgagtacgttaagcgggccggagctggcgttacaaaaattgggtaaaacgccgttaggacgctatctgttcacaagtagcacattaacccgggactttattgagataggccgtgatgccgggctgtgggggcgacgttcccgcctgcgattaagcggtaaaccgctgttgctaacagaactgtttttaccggcgagtccgttgtactaagaggaaaaaaatatggagtggagtctgacgcagaataagctgctggcgtttcatcgcttaatgcgtacggataagccaattggcgcgttactgctgctctggccaacattatgggcgttgtgggtggcgacaccgggcgttccccagctctggatcctggcggtgtttgtcgcgggtgtctggctgatgcgcgctgccggatgtgtggtgaatgattatgctgaccgcaagtttgatggtcatgttaagcgcacggcgaaccgaccacttcccagcggcgcggtaacagagaaagaggcgcgcgcgctgtttgtcgtgctggtactgattagctttttactggtgctgacgctgaatacgatgaccattctgttgagcattgccgcgctagcgctggcgtgggtgtacccgtttatgaagcggtatacccatctaccgcaagtggtgctgggcgcggcgtttggctggagcattccaatggcttttgccgctgtgagtgagagcgtgccattgagttgctggttaatgttcctcgccaatattctctgggcggtggcttacgacacgcagtatgcgatggttgaccgcgatgatgatgtgaagattggcattaaatccacggcaatcctgttcggccaatacgataaattgattattggtattttgcagattggcgtactggcactgatggcgatcatcggtgagttaaatggcttaggctggggatattactggagtattctggtggctggcgcgctgtttgtttatcaacaaaaactgattgccaaccgcgagcgtgaagcctgctttaaagcatttatgaataataactatgttggtctggtactatttttagggctggcaatgagttactggcatttctgatgatgtaaaaaagccggatgatcatccggctttcttctgggttgcctgatgcgcggcgcttctcaggcctacacaacacatcgcaatttattgaatttgcagattatggaaggccggataaggcgttttcgccgcatccggcaattctctctgattacccttcgccctgcgtcgcactctcaatcgtcaaacgcacgtcacttgtaatcaactccgccagcaactgataaaccttcatcgtttctgccggttcggcatcgccgctatcgctgatatacccttcatcacgcagtgtcagcaccagagaactgaacaccgccttgtcgaagaactccggcgcgttgatgccgtgcagcacggagagacgttgcgcgacggtgcggctctctttctccagcgtaccgcggttgatgctcgggttggcactcaacaaccagaaggtgatggcataacgttgcagcgtttcgcgcgcgcctgcggccagcagctgtagcgtgcgagaatgcgccgggttgatatgcaactcatcatcttgcagggtaatcagcccctgacgttgcatctcatttgccagcgcatcaataacgtccggcaactcgtcgcgatcccagcgcaggaacagctccgctttcagcattgggtaaagcacattgacgtgctccatcaatacgtcgcgggagatgtggcgatgctgggtgacgattgccgccatcaggctaggcagcaccaacatatgcgcaatgttgttgcgatagtaggtcatcagcaccgcttgctcgcgcggcagaatgatgatgtcgccgattgtgtctttctcgacttcaaacttgttcatttgcagcgcgtgatcgataagctcgctggcgctggcactaggaacggtagagtccgtggagtagggcacgttgcgcatcagatccaggtagcagttgagttgctcggttaactgctcgcgggtgagactgcgctgacgacttgccagtagcgcagtacagcacaggttcatggcgtttgccgcgcctgcgttgttaatgcgtaccatcagatcggcagcaatattattgaccgtcggcgttaaccatgccggacgcaccgcttcgatgggatcgatagattcacgccagtcaggtacatgctggttaaggtaggtcatcaacggcattggttcaccgaagttgacgtaaccctgaccgagattacgcagcttgcttaaaccgcgcagcatctgcggcaggctctctttctctttcgtcgcgccgcgcagttctttggcgtaagtacccacttccatgacgtgctcataaccgatatagatcggaatcagcgtaatcggacgcgtgccgccacgcagcatcgcctgaatggtcatgctcagcgtaccagttttcggatccagcaaacgccccgtacgggaacgaccgccttccacgaagtactcgacggaataaccacggctgaacagttcgccgagatactcccggaaaacggtggaataaagtttattgcctttaaacgtacggcgaataaagaacgcccccagacggcggaaaatcggcccggcaggccagaaattcaggttgatcccggcggcgatatgcggcggcaccagcccctggtgatacagcacgtaagaaagcagcaggtagtccatgtgactgcggtggcaaggcacatataccagctcatgaccgtcgtgggccagctggcgaacgcgctcagcgttatggacgttgatgccctggtaaagtcggttccaggtgaagcccagaatacggtcagtcaggcgaatcatctcgtaagagaaattcgccgcaatctcttccatcagtgcaatcgcgttctgctgcgctttttcatgggagatttttttgctgcgcgcttcatcttctaccgctttggcaatggcgcgggaggcgagcagcttattaaacagatcctgacgagcaggcaaacgtgggcctacggcagccagacgttgacgggcaaagtgcatacgcgccacgcgcgccagtttctgagcgatagttttatccgtgccgtgttcatccgccatacggcgcaggctaacactcgggctgaaacgcacaaaactgtcgcgaccgagccacagtacagcgaaaaatttctgtacgccgttaagcatacgcagcggcgggttcacttcgcctttttcacgccccggcgcgcgaccaaacatcacgctcactggcaccatctgcacatccagatttgggttgctacggtgcaaatcgagatagtcgtggaacagcttaatagactcttctttcggcgtgtaataggtgaacacacgcggcccgccgtgaatgaacacatagcgcggcagtagcgtgccgtcgatttccagcggctctaacgggtcaggcaagtcatgtgccagacactgggcgcgcaacgtcagcaaatctgctttgctgttgtacggtaaaacgtacataattggacgagaggtatccagccccagttccggggcaggatctgccggaatagacttgctttttaccaggatgcttaatggtaaattcagtaatttgtagtaaattcgtggccagccggacataaacgatgtaaagcctctggttaataatgcaaatgcgcggcaaggatagcagaaagtcatgggaaattctgtggtatccgctcatgtttcgcgcggcgctacgcaaacccgaatcatcggatttaacggtacactgatattgacgctcataatgtaaaaaggttctttcaatggccaataataccactggattcacccgaattatcaaagctgctggctattcctggaaaggtttacgcgctgcatggatcaacgaagcggcattccgtcaggaaggcgtagcggtattgttggcggtggtcatcgcctgctggctggatgtggacgcgattacccgcgtgctgcttatcagctccgtgatgctggtgatgattgtggaaatcctcaatagcgccatcgaagcagtggttgaccgaattggctctgaataccatgagctttccggacgcgcaaaagatatgggatccgctgcggtgctgattgccattatcgtcgccgtgattacctggtgcattctgttatggagccattttggataacccttccagaattcgataaatctctggtttattgtgcagtttatggttccaaaatcgccttttgctgtatatactcacagcataactgtatatacacccagggggcggaatgaaagcgttaacggccaggcaacaagaggtgtttgatctcatccgtgatcacatcagccagacaggtatgccgccgacgcgtgcggaaatcgcgcagcgtttggggttccgttccccaaacgcggctgaagaacatctgaaggcgctggcacgcaaaggcgttattgaaattgtttccggcgcaagtcgcgggattcgtctgttgcaggaagaggaagaagggttgccgctggtaggtcgtgtggctgccggtgaaccacttctggcgcaacagcatattgaaggtcattatcaggtcgatccttccttattcaagccgaatgctgatttcctgctgcgcgtcagcgggatgagcatgaaagatatcggcattatggatggtgacttgctggcagtgcataaaactcaggatgtacgtaacggtcaggtcgttgtcgcacgtattgatgacgaagttaccgttaagcgcctgaaaaaacagggcaataaagtcgaactgttgccagaaaatagcgagtttaaaccaattgtcgttgaccttcgtcagcagagcttcaccattgaagggctggcggttggggttattcgcaacggcgactggctgtaacatatctctgagaccgcgatgccgcctggcgtcgcggtttgttttagttctctcttcatcaggcttgtctgcatggcattcctcactagttctgataaagcactctggcatctcgccttacccatgattttctccaatatcaccgttccgttgctgggactggtcgatacggcggtaattggtcatcttgatagcccggtttatttgggcggcgtggcggttggtgcaacggcgaccagctttctctttatgctgttgctgtttttacgcatgagcaccaccgggctgactgcgcaggcttatggtgccaaaaatcctcaggcattagcccgtacgctggtgcaaccgttgctgttggcgttgggggctggggcgttaattgcgctgctgcgtacgccgattatcgatctggcgctgcatattgttggcggtagtgaggcagtcctggaacaggcgcggcgctttcttgaaatccgctggttaagcgcaccggcgagcctggcgaatctggtattactcggttggttactcggcgtgcaatatgcccgtgcgccagtaattttgttagtggtcggcaatatcctcaacattgtgctggatgtctggctggtgatggggctgcatatgaacgtgcagggcgcggcgctggcgacggttattgcggaatatgcaacattgctgattggtctgctaatggtgcgtaaaatcctcaaactacgcggaatttccggcgaaatgctgaaaactgcctggcgaggaaacttccgtcgcttgctggcgcttaaccgcgatatcatgctgcgtagcctgttgttgcaactctgtttcggcgcgatcaccgtacttggcgcgcgactggggagtgacattatcgctgttaacgcggttctgatgacgctactcacctttaccgcctatgcgctggatggttttgcctacgcggttgaagcgcactccggtcaggcatacggtgcgcgcgacggtagccagttgctggatgtctggcgggcagcgtgccgccagagcgggatcgtagcgttactgtttagcgtggtttatttgctggctggggaacacatcattgcgttactgacgagcttaacccagattcagcagctggctgaccgctatcttatctggcaggtgattttgccggtggttggcgtctggtgttatctgctggacggcatgtttataggcgcaacgcgtgccaccgaaatgcgtaacagtatggcggtggccgccgcaggttttgcgctgacgctccttacgctgccgtggctgggtaatcatgctttgtggctggcattaaccgtctttctggcgttgcgcgggctttctctggcggctatctggcggcgtcactggcgcaatggtacctggtttgccgcaacgtgacggttaaaaattctgaataaataatcctaagccaaattgctgactacacttaatctcacgttcagaagaaaagtgaacgtactctcattcacaacctaacgatgaggtcttgattatgaataaagatgaagccggcggtaactggaaacagtttaaaggtaaagtgaaagagcaatggggcaaactgaccgatgatgatatgacgatcattgaaggtaaacgtgatcaactggtcggtaaaatccaggaacgttatggttatcagaaagatcaggcagaaaaagaggtcgtggattgggaaacccgcaatgaatatcgctggtaattaatccctcctgcccgacgtgtacaaggatgtacgccctcttaacgcggtttctttttcacctgcacagagtgatcatgctggcactgttcaggatgacgacacgcttccacttctacacatgccgcacagagcccatgtgcttcaatcacattatgccgcagggcaaaccccatttttgccgccagcgtatgcataatgtcttccacgccttctgcacactcttctttcactgcgccgcagcgatcgcaaataaacatggcactcgtatgggtgggctgatcgaacagatgacagagcacataactgttggtggattccaccttatgcacaaaaccttgctcaagcagaaaatccagcgcgcgataaaccgttggcggcttggcttgcggttcagcttcgcgcagtaaatcaagcagatcataagcgctgatagcgccatcctgcagactcatcaggcgcaacacttccaggcgctgtggggtcaggcgcacattacgctgcgcgcagattttttcagcctgcgctaataactcctgcgttgtggtcttttccatcgggcacctcaaagtgggggttaagaatgtccttactttaccatgttccaggaaaaacaccgagaacccttattgttgccgtaatgttgattttctgctttgtaggtaaggtgttatgttgccttgtcgtaccattatcaacacgataataattaataattcatttttaaataaattgcttcaagttaactcgctatttatttaactgggtttaaacgcatacctgtagttcagaaattatgagcgatttttgatagtgaccagatggcaaaagaattataaggaggacacggtacgacaaaaaaggtagatgaatcatgttgaagataatacccggtgcaactggatactttaataaaacactcaatagtaatcaattcgataatgaagatgcaatcaaagataaattagataatagaggtagtatcaaaggtaaattaaataatatatatggtaaatctattgattatgcagcgctgcgtcatcgggatataattattgcaaaaatagatttgtttattcaacgaatcacgcataatttatggcatgcacgtaaaaaaatgtgtttttaattgtgcaaataaatgatctcaaaatgtgggtcaataagtatattgacgattgcactgatgaggatttaaacgatcgtgactttattgcaagtgttgttgaccgggctatttttcatttcgcgattaatagtatatgtaatcctggggataataaagatgcaatgcccattgaacaatgtacttttgatgtagaaactaagaatgaccttccctccacggttcagctattttatgaggaatctaaggataatgaacctttagcgaatatacattttcaagcaataggttctggttttttaacgtttgttaatgcctgccaggaacatgatgacaacagcttaaaattatttgctagcctgttaattagtcttagttattctagtgcctacgcagatttaagtgaaacagtgtatattaatgaaaataatgagagctacctgaaagctcagtttgaaaaattatctcaacgtgatatgaagaagtacctgggagagatgaagcgtctggctgatgggggagaaatgaattttgatggctatctggataagatgagtcatctggtgaatgaaggaacgctcgatcctgatattttaagcaaaatgcgagatgctgcaccacaattaattagcttcgcgaagagctttgacccaaccagtaaggaagagattaaaatacttacagacacttctaaattaatttatgatttgttcggggttaaaagcgagaaataatatgtgaagttcttcgatagtatggaaggcattatataaaaggacccaatatttattgggttcttttttctctatcaatactattagcagggagatatatcaccagagtttaatgtgtgattttttatttatcgtcgaacctggattgtttatcattggccttaacaaagttaacggctaataagattatttccatcacttcgtgagagcttcatgccttgagaggatctcaattttcttttgcaatgagacaggcgcttcctgttgttatggtatagtaccccgctattgagcctcctgaatagtgatgctgaataacataaccccatgatatatcgataaaataatctctacatttgaaaatgcacggtaattctgaaatgcaaaaaatcaaccaaaccagcgcaatgcctgaaaaaactgacgttcactggagtggtcggtttagcgttgcaccaatgctcgactggacggacagacattgccgctatttcttgcgtctgctttcccgcaatacgttgctgtataccgaaatggtgaccacaggggcgattattcacggtaaaggtgattatctggcgtacagtgaagaagaacatccggtagcgttgcaactgggcggtagcgatccggcggcgctggcgcagtgtgcaaagctggcagaagcgcgcggatatgatgagatcaacctgaatgtcggctgcccgtctgaccgggtgcagaacggcatgtttggtgcgtgtctgatgggtaatgcgcagctggttgccgactgcgtgaaagcgatgcgcgatgtggtgagcattccggtgacggtgaaaacgcgtattggcatcgacgaccaggacagctatgaatttctctgcgatttcatcaataccgtttccggcaaaggcgagtgtgagatgttcatcatccacgcacgtaaagcctggcttagcgggttaagcccgaaagaaaaccgtgaaatcccgccgctcgattatccgcgtgtgtatcaactgaagcgtgactttccgcatctgacaatgagcattaacggtggtatcaagagcctggaagaggccaaagcacacctgcaacatatggatggcgtgatggtcgggcgcgaggcgtatcagaatccgggtattctggcggcggtagaccgggagatctttggttccagcgataccgatgccgatccggtggcggtagtgcgcgccatgtatccgtacattgagcgtgaactcagccaggggacgtatctcggccatattacccggcatatgttgggcttgttccagggtattcctggcgcgcggcagtggcggcgttatttaagtgaaaatgcccataaagcgggtgcagacattaatgtgctggaacacgcgctcaaactggtggcggataagcgttaacttttcaccaaaaagtagtcaaattcaccacgccctgcgcaccgtcgcggggcgttttgctgttaaatcaatagattatttttggcatgattcttgtaatgccagcaagagatttcatatttgggagagcatcatgctggaactactttttgtgattggcttttttgtcatgctgatggtcaccggcgttagcttgctgggcattatcgccgcgctggttgtggcgacggccattatgttcctcggcggtatgctggcattgatgattaagttgctgccgtggttactactggcgattgcggtggtgtgggttattaaggcgattaaagcaccaaaagtgccgaaatatcagcgttatgaccgctggcgttactaagggattgtgcggatgatcacaacctaaggttttatccttagaacaaaataggaattgataatcaaatctgtcactattgcgcctctaacagattcatcgtgctgtaccctacatacagccgaactataaaaagaaagggcttcccaggtggaagccctatttcttttatggaatcagcaggctggaaccttgcgtcgcccggctttccagaatctcatgcgcacgctgcgcatccttcagcggatatttctgctgctcggcgacatcgaccttaatcacaccgctggcaatcaaagagaacagttcattactggcctcggttaattcctcccgcgtggtgatatagccttgcagggaagggcgtgtcacatacaagctgcctttttgattgagaatgcctaagttcacaccggtaaccgcaccactactgttgccaaaactgaccattaagccgcggcgttgcaggcaatccaggctccgttcccaggtgtctctgcccacggaatcgtacaccacgcgcactttcttaccgccggtgatctcttttaaccgctcgaccagatcctcttcacgatagttaataacctgccacgcgcccgcttttagcgcgctctgcgctttttgcgcggttcctacggtgccgataagtttcgcgcccagggcttttgcccactggcaggcaattaagccaacgccgccagccgctgcgtggaacaggaactgttcatcgggtttaatttcataggttttgcgcagcagataataaaccgttaagcctttcaggaaggatgccgcagcttgctcaaaagaaattgccgcaggcagaatcgccgctttatccgcaataatgttatgcacagagctgtaagcgcctaacgcgctctgcgcatagactacacgatcgcctgccttaatatgctttacaccactgccgactttactcacgatgcctgctgcttcggtgcctaatccgctgggtaggcttggcggcgggtaaaggccgctgcggatatatgtgtcgataaaattgatgccgatggctttattttcgacctggatttcattctccgccggatcggcaggagtgaactctacggcttgaagtacttccgggccaccgtgcttgtgaaattcaattcgtgttgccatgtgtcctccagaacgtatcgtcagggtctgcttcatatgataaagtttcgacccattctttatctcggtaactccattcactatggcaggaaataaacccttcaacaaacagcaggctgaaccccgcgaacgcgatccacaagttgccgggctgaaagtgcctccgcacagcatcgaagcggagcagagcgtgttgggcggtttaatgctagataacgaacgctgggatgatgtagccgagcgtgtggtagcagacgatttttacacccgcccacaccgtcatatctttactgaaatggcgcgtttgcaggaaagcggtagccctatcgatctgattactcttgcggaaagcctggaacgccaggggcaactcgatagcgtcggtggttttgcttatctggcagagctgagtaaaaatacgccaagtgcggctaacatcagtgcctatgcggacatcgtgcgtgaacgtgccgttgtccgtgagatgatcagcgttgcgaatgagattgccgaagctggttttgatccgcaggggcgtaccagcgaagatctgctggatctggctgaatcccgcgtctttaaaattgccgaaagtcgtgcgaacaaagacgaagggccgaagaacatcgccgatgtgctcgacacaaccgtggcgcgtattgagcagttgtttcagcagccacacgatggcgttaccggggtaaacaccggttatgacgatctcaacaaaaaaaccgctggcttgcagccgagcgatttgatcatcgtcgccgcgcgtccgagcatgggtaaaacaacatttgcgatgaacctcgtcgaaaacgcggcgatgttgcaggataaaccggtacttatcttcagcctggagatgccaagtgaacagatcatgatgcgttctctggcgagcctgagccgcgttgaccagactaaaatccgtaccgggcagctcgatgacgaagactgggcgcgcatttccggcaccatgggtattttgctcgaaaaacgcaatatctatatcgatgactcctccggcctgacgccaacggaagtgcgttcccgcgcacgccgtattgcccgtgaacacggcggcatcgggcttatcatgatcgactacctgcaactgatgcgcgtaccggcgctttccgataaccgtacgctggaaattgcagaaatctctcgcagcctgaaagcactggcgaaagaactgaacgtgccggtggtggcgctgtcccagttgaaccgttctctggaacaacgtgccgacaaacgcccggtcaactccgacctgcgtgaatctggctctatcgagcaggatgcggacttgatcatgtttatctatcgtgatgaggtgtatcacgaaaacagtgatttaaaaggcatcgcggaaattattatcggtaaacaacgtaacggcccaatcgggacggtacgcctgacctttaacggtcaatggagccgcttcgacaactatgcggggccgcagtacgacgacgaataataattattttatgaattaggtaattaaagcaaacacttatcaaggaacacaaatgcaagcggcaactgttgtgattaaccgccgcgctctgcgacacaacctgcaacgtcttcgtgaactggcccctgccagtaaaatggttgcggtggtgaaagcgaacgcttatggtcacggtcttcttgagaccgcgcgaacgctccccgatgctgacgcctttggcgtagcccgtctcgaagaagctctgcgactgcgtgcggggggaatcaccaaacctgtactgttactcgaaggcttttttgatgccagagatctgccgacgatttctgcgcaacattttcataccgccgtgcataacgaagaacagctggctgcgctggaagaggctagcctggacgagccggttaccgtctggatgaaactcgataccggtatgcaccgtctgggcgtaaggccggaacaggctgaggcgttttatcatcgcctgacccagtgcaaaaacgttcgtcagccggtgaatatcgtcagccattttgcgcgcgcggatgaaccaaaatgtggcgcaaccgagaaacaactcgctatctttaataccttttgcgaaggcaaacctggtcaacgttccattgccgcgagcggtggcattctgctgtggccacagagccattttgactgggtgcgcccgggcatcattctttatggcgtcagcccgctggaagatcgctccaccggtgccgattttggctgtcagccagtgatgagtctaacctccagcctgattgccgtgcgtgagcataaagccggagagcctgttggttatggtggaacctgggtaagcgaacgtgatacccgtcttggcgtagtcgcgatgggctatggcgatggttatccgcgcgccgcgccgtccggtacgccagtgctggtgaacggtcgcgaagtaccgattgtcgggcgcgtggcgatggatatgatctgcgtagacttaggtccacaggcgcaggacaaagccggggatccggtcattttatggggcgaaggtttgcccgtagaacgtatcgctgaaatgacgaaagtaagcgcttacgaacttattacgcgcctgactagtagggtcgcgatgaaatacgtggattaatcgttctgtaatatttgattgtctgtgccggatgcggcgtgaatgccttatccggccaataaaatcctaaaaattcaataagttgatgttctttcatgctcttataaaggtcgtgcctctggcggatgtacgtttgtcatgagtctcactctgttgctaattgccgttcgctcctgaacatccactcgatcttcgccttcttccggtttattgtgttttaaccacctgcccgtaaacctggagaaccatcgcgtgtttcaaaaagttgacgcctacgctggcgacccgattcttacgcttatggagcgttttaaagaagaccctcgcagcgacaaagtgaatttaagtatcggtctgtactacaacgaagacggaattattccacaactgcaagccgtggcggaggcggaagcgcgcctgaatgcgcagcctcatggcgctagcctttatttaccgatggaagggcttaactgctatcgccatgccattgcgccgctgctgtttggtgcggaccatccggtactgaaacaacagcgcgtagcaaccattcaaacccttggcggctccggggcattgaaagtgggcgcggatttcctgaaacgctacttcccggaaagtggcgtctgggtcagcgatcctacctgggaaaaccacgtagcaatattcgccggggctggattcgaagtgagtacttacccctggtatgacgaagcgactaacggcgtgcgctttaatgacctgttggcgacgctgaaaacattacctgcccgcagtattgtgttgctgcatccatgttgccacaacccaacgggtgccgatctcactaatgatcagtgggatgcggtgattgaaattctcaaagcccgcgagcttattccattcctcgatattgcctatcaaggatttggtgccggtatggaagaggatgcctacgctattcgcgccattgccagcgctggattacccgctctggtgagcaatagcttcagcaaaattttctccctttacggcgagcgcgtcggcggactttctgttatgtgtgaagatgccgaagccgctggccgcgtactggggcaattgaaagcaacagttcgccgcaactactccagcccgccgaattttggtgcgcaggtggtggctgcagtgctgaatgacgaggcattgaaagccagctggctggcggaagtagaagagatgcgtactcgcattctggcaatgcgtcaggaattggtgaaggtattaagcacagagatgccagaacgcaatttcgattatctgcttaatcagcgcggcatgttcagttataccggtttaagtgccgctcaggttgaccgactacgtgaagaatttggtgtctatctcatcgccagcggtcgcatgtgtgtcgccgggttaaatacggcaaatgtacaacgtgtggcaaaggcgtttgctgcggtgatgtaatgcaggaaagcaggctggagctacccagcctgcagtgaaattaaactgtcgtcgctttcactctttctttatagatgatttttttgatgccatcgttctacgtgagagataataaacgttgttagttcttttattgttaagcttatcccaattatctggaattccttatcctgtttttttgggtggagtaataatttctgcacatctaaccattattaaatttaataataagtatcgggtttgttacgatagaatatttctatatcctcaagaatatgctttgccttattgcctgtgactttctgagattcaattatagtatcgttaaattctaatgttaaagagaactcttttttccgctttgtgtaagtttaaccttatattgattaccaatatcaaataaaaaggtcctgtaatgagaataatcacctttaacctcctcggcaaaacagcaaagcgtgcaaatatacataaagtctttcttacccctgattttgttaactaaatcaataaatgcgtgaaaaactttacttgcaatagaacttgatacttcttctccaggtctaaaaaatcttttgcaatttttaactgtgtttctatgtataaaaagaaatctttggcataagagatatctttattatttagtgcatctagctcaacaggtaaagatgtcgttttgttgctattcacatatgatatattcatatcatcatctccatcgcgagtaataaaattaatcaccattgtagggtagggggctggtcaatcagaaatcatctttataaacttcgattgtttttgtaatgctgtatcattaagttcattaaatcgtacagcagataaatgttctatcaaatttcgctcatttgccgaggattcatcataataaacgtaaaattaatgtatccttacatcgagtaataaacattttttatacaaaaaaagacaggaacgtatttactgggttaaatataatcatcctgcttttcatcacaaaaaccgcagataatccttcctttccccggcagctggcgttatggtcagatggtttttgcaacaaatctcacaataaaaagtttcaacatactgactatttagggaaaaatatgcgcaagatcacacaggcaatcagtgccgtttgcttattgttcgctctaaacagttccgctgttgccctggccagttctcctagtccgcttaaccctgggactaacgttgccaggcttgctgaacaggcacccattcattgggttagcgtcgcacaaattgaaaatagcctcgcagggcgtccgccaatggcggtggggtttgatatcgatgacacggtacttttttccagtccgggcttctggcgcggcaaaaaaaccttcagcccagaaagcgaagattatctgaaaaatcctgtgttctgggaaaaaatgaacaatggctgggatgaattcagcattccaaaagaggtcgctcgccagctgattgatatgcatgtacgccgcggtgacgcgatcttctttgtgactggtcgtagcccgacgaaaacagaaacggttagtaaaacgctggcggataattttcatattcctgccaccaacatgaatccggtgatctttgcgggcgataaaccagggcaaaatacaaaaagccaatggctgcaggataaaaatatccgaattttttatggcgattctgataatgatattaccgccgcacgcgatgtcggcgctcgtggtatccgcattctgcgcgcctccaactctacctacaaacccttgccacaagcgggtgcgtttggtgaagaggtgatcgtcaatagtgaatactgacagagcgggagagcgtgatgctctcccgaatgctgtttttttaatcacacctttatcctttcgctgtcttgctgcaaactgattaagagagttttatcaaggagcagcacatgtggtatcaaaagacgctcacgcttagcgccaaatctcgtgggtttcatctggtaacggatgaaattctgaatcagctggctgatatgccgcgcgttaacatcggcttactgcatctgttgctgcaacatacctccgcctctctgacacttaatgagaactgcgatcccaccgtacgccacgacatggagcgttttttcctccgcaccgttcccgacaacggaaattatgagcatgactatgagggagcagacgatatgccttctcatatcaaatccagtatgctgggaacaagccttgtattgccggtgcataaagggcgtattcagaccggcacctggcaaggcatttggctgggggaacatcgcatccacggcggaagccgtcgcatcatcgcgacactacaaggggagtaaaaaatgaccattagcgagttgctacaatattgcatggcaaaaccaggcgcagaacagagcgtgcataatgactggaaagcgacgcagatcaaagtggaagatgtactgtttgcgatggtgaaagaagtagaaaatcgcccagctgttagcctgaaaaccagcccggagctggcggagctgctacgtcagcagcacagcgatgtgcgtccaagccgccatctgaataaagcgcactggagcaccgtgtatctcgacggtagcctgccagatagccaaatctattatctggtggatgcgtcttatcagcaggcggtgaatttactgccggaagaaaaacgtaaattgctggtgcaactctgaaaggaaaaggccgctcagaaagcggccttaacgattacagcatcggcttaaggaagcgtgccgtgtgacttgcttcgcactccgcgacggtttctggcgtaccggagacgaggatctcgccgccaccactgccgccttctggtcccaggtcgacaatccagtcagcggttttgatcacgtcgagattgtgctcaatcaccacaatggtgttgccctgatcgcgcagtttatgcagtacgtcgagcagttgctgaatatcggcgaagtgcagaccggtggtcggctcgtcgagaatatacagcgtctgcccggtgccgcgtttactcagttcacgcgccagcttcacgcgctgggcttcaccgccactaagggtggttgcggactgccccagtcgaatgtacgtcaggccaacgtccatcaacgtttgcagcttacgcgccagtgcaggtacggcatcaaagaactcacgcgcctcttcgatggtcatatccagcacttcgtggatggttttgcctttgtacttaatctccagcgtttcacggttatagcgtttacctttgcactggtcgcacggcacgtagatatccggcaggaagtgcatctccactttgatcacgccatcgccctgacaggcctcgcagcgtccgccacgaacgttaaagctgaaacgtcccggcgtatagccgcgcgcacgggattccggtacgcccgcaaacagttcgcgcacaggcgtaaacacgccggtataggtcgccgggttagaacgtggagtacgaccaattgggctttggtcgatatcgatcactttatcgaaatgctccagcccctgaatatcgcgatacggtgctggttcggcgatggtcgccccattcaactggcgttgggcaatcgggaacagtgtgtcgttaatcagcgtgcttttaccggaaccactaaccccggtgatgcaggtaaacagacccaccggcagcgtcagcgtcacgtccttcaggttgttgccgcgtgcgcctgtcagcttcagcactttttccggattcgccggaacgcgtttcttcggcacttcaatcttgcgtttgccgctcatgtactgcccggtcaagctctccggcaccgccataatcgcttccagcggaccttctgcgaccacttcaccgccgtgaacacctgcgcccgggccaatgtcgatcacatggtcagcggcgcgaattgcgtcttcgtcgtgctccaccacaatcacggtattaccgagatcgcgcagatggataagcgtacccaacaggcgctcgttatcacgctggtgcaggccgatagacggctcgtccagcacgtacataacgccaaccaggcccgcaccaatctggctcgccagacggatacgctgtgcttcaccgccagaaagcgtttctgcgctgcgggaaagcgtcaggtaattcaggccgacgttaacgaggaatttcagacgatcgccgatctctttaaggattttttctgcaatcttcgcccgctgacctgcgagtttgagattgttgaagaattccatcgcatgaccaatgctcatgtcggagatagcaggcagcggcgtattctcgacatacacgtggcgcgcttcccgacgcagacgcgtcccttcgcagctggcgcacggacgattactgataaacttggctaattcttcgcgtaccgcgctggattccgtctctttatagcggcgctccatattatgcagcacgccttcgaacggatgacgacgaatggaggtatcgccacgatcgttcatgtatttgaattcaatgttttctttgccagaaccgtacaacaccactttatgcacgttcgcgctcaggctgccccacggcgcttcgacgtcgaacttatagtgatctgccaggcttttcagcatctggaaataatagaagttgcggcgatcccagccacggatcgcaccaccagccaggctcagttccggattctggatcactcgatcaggatcgaaatattgctgtacgccaaggccgtcgcaggtcgggcaggcccccgccgggttgttaaagctaaacagtcgcggctccagttcacgcatactgtagccgcaaattgggcaggcgaagttggcggagaacagcagctcttccgctttcgggtcgtccatatccgccactaccgcggtaccaccggaaagctccagcgcggtttcaaaactctcggcaagacgttgggtaagatcgtcacgcaccttgaagcgatcaaccaccacttcaatggtatgtttcttttgcagttccagttttggcggatcggaaagatcgcagacttcgccatcaatacgagcacggatgtagccctggcttgccaggttctccagcgttttggtgtgttcgcctttgcgctctttaatgattggcgcgagtagcatcagacgcttgccttccggctggctcagcacgttatccaccatctggctgacggtttgcgccgccagcgggacgtcgtggtccggacagcgcggctcgccaacgcgggcgaataacaaacgcaaatagtcgtggatttcggtgattgtccccaccgtagaacgcgggttatgagacgtgcttttctgctcaatactgatggcaggagaaagcccctcaatatgatcgacgtccggcttttccatcagactcagaaactgccgcgcgtaggcggaaagggattcaacgtaacggcgctgcccttcggcatataaggtgtcgaaagcgaggctggatttgccagaaccgctaagcccggtcacgacaatgagcttgtcgcgggggataacgaggttgatgtttttgagattatgggtgcgggcgccccgaacttcgatcttatccattcacctttcccggattaaacgcttttttgcccggtggcatggtgctaccggcgatcacaaacggttaattatgacacaaattgacctgaatgaatatacagtattggaatgcattacccggagtgttgtgtaacaatgtctggccaggtttgtttcccggaaccgaggtcacaacatagtaaaagcgctattggtaatggtacaatcgcgcgtttacacttattcagaacgatttttttcaggagacacgaacatggccagcagaggcgtaaacaaggttattctcgttggtaatctgggtcaggacccggaagtacgctacatgccaaatggtggcgcagttgccaacattacgctggctacttccgaatcctggcgtgataaagcgaccggcgagatgaaagaacagactgaatggcaccgcgttgtgctgttcggcaaactggcagaagtggcgagcgaatatctgcgtaaaggttctcaggtttatatcgaaggtcagctgcgtacccgtaaatggaccgatcaatccggtcaggatcgctacaccacagaagtcgtggtgaacgttggcggcaccatgcagatgctgggtggtcgtcagggtggtggcgctccggcaggtggcaatatcggtggtggtcagccgcagggcggttggggtcagcctcagcagccgcagggtggcaatcagttcagcggcggcgcgcagtctcgcccgcagcagtccgctccggcagcgccgtctaacgagccgccgatggactttgatgatgacattccgttctgatttgtcattaaaacaataggttatattgttttaaggtggatgattaaagcatctgccagccataaaaaagaagcctccgttatggaggcttctacgtatcaggtcaaaatcattggccattgtggcggtgtctgattcatctcttctatcatcacgctctcgatgttgtgccagatagcggtgatgtccgccattgtgatgccaagcaaccccattgcgaaccaacaggcggaaacaacgcccagaccgctgctgatcaccgcaagcccgacataatcagaccgacgaaaacggatgttgagtgtgctggccagaaacatcattacggcactaagaagttgccagcgaagaagaaccacgccagtggtgagggtagccatcaaacaattcctctgaaaagagccgatgccctggacagcgcggcgttgttcacgggaggcgtggtacactctggctatcgcggggcttgcagaacacaaaaatgaaacactctgtttgtttcattaattttgtgaactatatcacaattgattgtttgttagccatattaggccgtgacttttattgctgtacagattatgtggtttttcagtggcattaagggcatatcttcccgccgcctctgcattcctgtaggaaattaattttgaatatcaatgaattattttcatccaggtgacgattagaaaggtatcaatttcaaatcaggcaaaagtgctatttataccgtaagatttatctaaagacgtcggtacccagggttttcaccttgcaatggccgggtataaacaggcaggaaattgatagcaatgagtcatcgtgcacgacaccaattactggcgttgccgggcattatctttttagttctctttcccatcattcttagcctatggattgccttcctttgggcaaaaagtgaagtgaataatcagctccgaacctttgctcaactggcactggataaatccgagctggtcattcgccaggcagatttagtgagcgatgcagctgaacgctatcaggggcaagtttgcactccagcccatcaaaagcgaatgttgaatattattcgtggctatctttatattaatgaattgatctatgcccgtgataaccattttttatgcagtagcctgatagcgcctgtaaacggctatacgattgcaccggccgattataagcgtgaacctaacgtttctatctattattaccgcgatacgccttttttctctggctataaaatgacctatatgcagcggggaaattatgtggcggttatcaaccctctcttctggagtgaagtgatgtctgatgacccgacattgcaatggggtgtgtatgatacggtgacgaaaacctttttcagcttaagcaaagaggccagcgcagcaacgttttctccgctgattcatttgaaggatttaaccgtacaaagaaatggctatttatatgcgacagtttatagcacaaaacgcccaattgcagccattgttgcgactagttatcaacgtcttataacccatttttataatcatcttatttttgcgttgcccgccggtattttggggagtcttgttctgctattactctggctacgtattcgacaaaactatttatctcccaaacgtaaattgcaacgcgccctcgaaaaacatcaactttgtctttattaccagccaataatcgatatcaaaacagaaaaatgtatcggcgctgaagcgttgttacgttggcctggtgagcaggggcaaataatgaatccggcagagtttattccgctggcagaaaaggaggggatgatagaacagataactgattatgttattgataatgtcttccgcgatctgggcgattacctggcaacacatgcagatcgctatgtttctattaacctgagcgcctccgattttcatacgagtcggttgatagcgcgaatcaatcagaaaacagagcaatacgcggtgcgtccgcagcaaattaaatttgaagtgactgagcatgcatttcttgatgttgacaaaatgacgccgattattctggctttccgccaggcaggttacgaagtggcaattgatgattttggtattggctactctaacttgcataaccttaaaagtttgaatgtcgatattttgaaaatcgacaaaagctttgttgaaacgctgaccacccacaaaaccagtcatttgattgcggaacacatcatcgagctggcgcacagcctggggttaaaaacgatcgctgaaggcgtcgaaactgaggagcaggttaactggctgcgcaaacgcggcgtgcgctattgccagggatggttctttgcgaaggcgatgccgccgcaggtgtttatgcaatggatggagcaattacccgcgcgggagttaacgcgcgggcaataaaattacaggcggtggcgataatcgctgggagtgcgatcaaactgccgacggaaaacgcgggagaaggtctgctggctgacataacccaggtccattgcgatatcaaaaatcggacgctcggtggtgcgcaactcaacggcggccagtaacaggcggcgttggcgaatgtaatcgccaagcgtctgatgcgtcaccgtgcggaacattcgttgcaagtaccacttactatagccacttttttttgcgactacatcaatgttaagcggctggtcaatatgctcgtcaatccatgcgataagatcctgaataattttctgatgggacataaatctgcctcttttcagtgttcagttcgttaattcatctgttggggagtataattcctcaagttaacttgaggtaaagcgatttatggaaaagaaattaccccgcattaaagcgctgctaacccccggcgaagtggcgaaacgcagcggtgtggcggtaagcgcgctgcatttctatgaaagtaaagggttgattaccagtatccgtaacagcggcaatcagcggcgatataaacgtgatgtgttgcgatatgttgcaattatcaaaattgctcagcgtattggcattccgctggcgaccattggtgaagcgtttggcgtgttgcccgaagggcatacgttaagtgcgaaagagtggaaacagcttagctcccaatggcgagaagagttggatcggcgcattcataccttagtggcgctgcgtgacgaactggacggatgtattggttgtggctgccttagccgcagtgattgcccgttgcgtaacccgggcgaccgcttaggagaagaaggtaccggcgcacgcttgctggaagatgaacaaaactaaagcgccacaagggcgctttagtttgttttccggtctttgtctttctctctatcccgctggtacacaggagggtttcccccgacgtcaacacacctcattcgagcacgtggtggaggttccggttggtgttgatgctttaattgtatgtcaccgacgtttcttcgccagtgtaaaagtatactttttaaccgcaatatttttgtcatctcagacgattttttatcgcaatcctgaacggtatacggctcgataacgctgcaatcttgcgcaccgacgataacgtttgcgcatcaattgcctggtttttcatcgtcaagacaataaaagagaaaaaagcagcaaacttcggttgaaaaagccgctatgatcgccggataatcgtttgctttttttaccacccgttttgtatgcgcggagctaaacgtttgcttttttgcgacgcagcaaattgtcgcaaacctggagcaggaagataacgtttcgctggcaggggattgtccgccacgcatcttgacgaaaattaaactctcaggggatgttttcttatgtctacgccaagtgcgcgtaccggcggtagtctcgacgcctggtttaaaattagtcaacgtggaagcactgtccgtcaggaagtggttgccgggttaacaacgtttctggcgatggtctacagcgtcatcgtcgttccaggtatgttgggtaaagcaggcttcccgcctgcggcagttttcgttgcaacctgtctggttgccggactcggttctatcgtgatgggtctgtgggctaatctgccgttggcgattggttgcgccatctccctgacagcgtttaccgcattcagcctggtgctggggcaacatattagcgtacctgtcgcgctgggtgccgtgttcctgatgggtgtgctgtttacggtaatttctgccacgggtatccgtagctggattttgcgcaacttgcctcacggtgtggcgcacggcacggggattggtatcggtctgttcctgctgctcattgccgctaacggtgtcggtctggtgattaaaaacccgcttgatggtctgcccgttgcgctgggtgatttcgcgaccttcccggtgattatgagtctggtaggtctggcggtgatcatcggcctggaaaaactgaaagtccctggtggcattctgctgaccattatcggtatcagtattgtcggtttgatcttcgatcctaacgtccatttctccggcgttttcgccatgcctagtttgagcgatgaaaacggcaatagtctgattggcagcctggacattatgggcgcgctgaatcctgtagtcctgccaagcgttctggcgctggtgatgacggcagtatttgatgccaccggaactatccgtgccgtcgccggccaggcgaacctgctggataaagatgggcagatcatcgacggtgggaaagcactgaccactgactccatgagcagcgttttctctggcctggtgggtgcggctccggcagcggtatacatcgagtctgcggcgggtacggcggcgggcggtaaaaccggtttgacggctatcaccgttggcgtgctgttcctcctgattctgttcctctctccgctctcttacctcgttccggggtatgcaacggctccggcgctgatgtacgttggcctgctgatgctgagcaacgtggcgaaaatcgactttgctgattttgttgatgcgatggcgggtctggttacggctgtattcatcgtgctgacctgtaacatcgtaacaggcatcatgatcggcttcgcgactctggtgattggtcgtctggtttccggcgaatggcgcaagttgaacatcggtacggtcgttatcgccgtggcgctggtgaccttctatgcgggtggctgggctatctaatctttcatcggattctgaaaacgggtggcaatggctgcccgtttttattttctccgcacattgtgtgagcttttgcgatattctgaaaaaaatgagaattcaggcataacgtctttctcagatcataaaaaacatcgcaaacagggaacgcatggaaatcttcttcaccatactgataatgaccctcgtggtcagcctgtccggggtggtcactcgtgtcatgccctttcagatcccgcttccgcttatgcaaatcgccatcggtgcgctactggcgtggccgacgtttggtttgcatgtggagtttgatcctgaactctttttagtcttgtttatcccgccgttgctgttcgctgatggctggaaaacgccgacccgtgaatttctcgaacatggtcgagagattttcggcctcgcgctggcgctggtggtggtcaccgtggtcggcattggcttccttatttactgggtggtgccgggcattccgctgatccctgcctttgcgctggcggcggtgctttctccgaccgatgctgtggcgctctccgggattgttggcgaagggcgcatcccgaaaaaaatcatgggcattttgcagggcgaagcgttgatgaatgacgcctccggtctggtgagcttgaagtttgccgtagcagtggcgatggggacgatgatcttcaccgtcggcggtgcgacggtcgaatttatgaaagtagccattggcggtattctcgccggttttgtggtgagctggctgtacggtcgcagcctgcgattcctcagccgctggggcggtgatgaacccgcgacgcagatcgtcctgctgttcctgctgccattcgcttcttatctgattgccgaacatattggcgtttccggcatcctcgctgcggttgccgccgggatgaccatcacccgctccggtgtgatgcgccgtgcgccgctggcaatgcgcctgcgtgcaaacagcacctgggcgatgctggaatttgtctttaacggcatggtgttcctgctgttaggtctgcagctgccgggtattctggagacgagcctgatggcagcagaaatcgaccctaacgtcgaaatctggatgctgtttaccaatattattctgatatatgcggcgctgatgctggtccgtttcggctggctgtggacgatgaaaaagttcagcaaccgcttcctgaagaagaagccgatggagtttggtagctggaccacacgagaaatcctgatcgcgtctttcgccggggtgcgtggggcgatcactctggccggtgtgctctctatcccgctgctcttgccggatggtaacgtcttcccggcgcgctatgagctggtgttcctggcggctggcgtcattctcttcagcctgtttgtcggcgtggtgatgttgcctattctgctacaacacattgaagtcgcggatcatagccaacaattgaaagaggaacgtattgcgcgagcggcaacggcagaagtggcgattgtggcgatccagaaaatggaggagcgtctggcggcggataccgaagagaatatcgataaccagctgcttacggaggtcagttctcgcgtcattggtaacctgcgtcgtcgcgccgatggacgtaacgacgttgaaagttccgtgcaggaagagaaccttgagcgtcgcttccgtctggcggcattgcgttctgaacgtgctgaactttaccacctgcgcgccacacgggagatcagcaacgaaacgctgcaaaaattactgcacgatctcgatttgcttgaagcgttgctaattgaggaaaatcagtaagccgaaagcgacgtaaccaggcccgaggtaatctgaaaaaggtgcaatcttttgcacctttaacaggttagctcgggctaacattcatgattctaaaacaaataaattatctctcttttaaagtcaattcattggctgttcttcgacttaacctcaatctgcatcttgcataatatctgcagtaatcttcatagcgactgcatgaagattatcctcagtttgactcatgccagtatgagtggcacaatcttcttcaaagaatttctgtagtgttaccaggatatcactattaatggagatattttcctcaccacggagaatggtaatacccattccctggacgctagcctcatcgaaattaacacgatagagacggatattaaacatccaggcttttgttaaaacagaacagttgaaatggcaattgcttaaattggcattattaaaattaacattagccatattagagtcggtacatataaccatttcgaggaacgtatttgttaaccgcgtaaaaaagagtttgctatcaattaagtttatattctggagggttgctttattcaggttgacacgagacagatcagcatgttcaaagttaattaaatcaagtttagagaagctaaggtcggctctaaataaattaatatatggcgctattactttataaagatttacctcagccatgtatgccatataaaaattactataatcaaggaaggtatttttaatattggctctattcattgttgcattgtagaattgaacatgcatagcggaacaactatttagagttccgtcagtcatttttatctgagcgaaattactgtcatcgagaatacaattatcaaaaagtattttttccattatggcgaaattaaaattcgttttatacatattacagtcctgaaaaatagcgttttgtagtctgcaacctgcaaaattgctattggataaatcttcatctttaatcacgatacctttcaggctaaggtgactaaaatcgtaaccaccatttactgtctgtgggatttcgatagtattattatggacggtgacattatttataaaatataccaccttaatactcacttccttatctttattaaggtaaactcttctcgtaattctatcgtcacatttattatttgcatgactagctatatctataaaatatttatgtattttcctgtccgtttctttcgtgatttttccacttggtaaactatcataaattcttttcattttctgaatcaagcctatcactttttcatgatcatccattttgaaaagagagagggctttattgtcaattaacgtgtttttatgatgtttgctgtaattatcactttttgttttctttgtatgacttggacttgtgacagagtggttatcgttaatcaggcaaagagggaaaaacatattatttaaaccattatagcgcataaaatatccttataattaacaagaaagaaaaggcatattctctgcattatcattttctacgactgtcaaaaatcgctcattttttaatgagtttatttgtttaatattatgggaaaaggtgatgcatttgggagaggaagagtattccccggtcagacgaccggggaaggggagagattaatgcgcgcggccttgctcaacgccaaagccggtctgggagcggataaactgcgcgcggaacagttcacgctcacgcgcgccttccgcactgttatcggttgcgctgaagaaccagatgccgaggaatgccacggtgatagagaacagcgccgggtattcatacgggaagatggctttttcgtgaccaaggatctgtacccaaatcgtcgggccgaggatcatcagtactactgcggtaatcagccccagccagccacccatcatcgcgccacgcgtggtcagtttgctccagtacatagaaagcagaatgatcgggaagttacagctcgccgcgatggcaaacgccagccccaccataaaggcgatgttctgattctcaaacagcacgccgaggataatcgcaatcacgccgaggatcagtacggtgattttacttacccgcagctcttcacgttcggtcgcgccttttttgaagacgttagcgtacaagtcatggctaaccgcggatgcgcccgccagcgtcagacccgcaaccaccgcgaggatagtggcgaaagcaaccgcactaataaaaccgaggaacaggttgccgcccactgcattcgccaggtgaacggccgccatgttgttaccaccaatcagatggcccgccgcgtctttatattccggattcgcaccaaccagcatgatcgcgccgaagccgataataaaggtcagaatatagaagtagcccataaacccggtggcgtagaacacgctcttacgtgcttcgcgggcatcgctgactgtaaagaagcgcatcagaatgtgcggcaagcccgccgtaccaaacatcagtcccagacccagagagagcgcggagatcggatctttcaccagcccgcccggcttcatgatgtcgacacctttcgggtgtaccgccatcgcttcactgaacagattgttgaagctaaagccgacgtgtttcatcaccataaaggccataaagctggcaccgaacagcaacagcacggctttgataatttgcacccaggtggtcgccagcatgccgccgaacaggacgtacatcatcatcagcacgccgaccagcaccaccgcaatgtgatagttaaggccaaacagcagctcgatcagtttacctgcgcccaccatctgggcgataaggtaaagcgccaccaccaccagagaaccacaggcgctaagaatacgaatcggcccttgtttcagacggtaagaggccacatcggcaaaggtgtagcgccccaggttacgcagacgttcggcaatcaggaacaaaatgatcggccagcccaccaggaagcccaggctgtaaattaagccgtcatagccggaggtaaacaccagcgcggagatccccaagaaactggcggcggacatatagtccccggcaatcgccagcccgttctggaagccagtgatattgccgcctgcggtgtagtagtcgctacgagaacgtacgcgtttacttgcccagtaggtaatgccgagcgtaaacacgacgaaaatcaggaacataataatcgcctgccagttcgttggctggcgctctacggccccgctaatagcatccgcggcgttagctgcgaaagggagtgtggcggcaagcgccgtcagaactcttttcatgatgcttgtacctcatgcagttatttcaacttgcttgtacctcatgcaggacttcattattaagacggtcgaattcgccgttcgcccgccagatgtagataccggtgagaacaaaggagatcacaatcactccaacaccaattggaataccgcgtgtgacgctggtgttcggattcagcggcgtgcccagccagccgggcgcgaaggcgatcagtaaaataaagccgatataaactgccagcataataatgctcaggatggtggcaaaccgttgccgtttttcgactaactccctgaaatgcgcattgtcttctatccgctgataaatagtgccattcatcacagattctccagaggtaatgtagggattgttttaattcccgctcccttatgggagaaggttaacgctcgggtaacccttgccgaatgtaggccggataaggcgtttacgccgcatccggcaatcaatgcctgatgcgacgctgtcgcgtcttatcaggcctacaaaccgttaccgactcgcatcgggcaattgtgggttagcttggcatcgcgatagcctgcttctcttcaagcagcttctcgactacgccaggatcggcaagcgtgctggtatcgcccaggttgctggtatcgcccgccgcaattttgcgcagaatacggcgcataattttgccggagcgggttttaggcagggagtcggtccagtgcagcacgtctggcgtcgccagcgggccaatctctttacgcacccagttgcggacttctgcgtacagttctggactcggttcctccccgtgattaagcgtgacgtaggcgtagatcgcctgacctttaatattgtgcggaatacctactacggcggcttcggcaatcttcggatgcgccaccagcgcgctctcaatctctgccgtccccagacggtgaccggagacgttcagcacgtcgtccacacgcccggttatccagtaatagccatcttcatcgcgacgcgcgccgtcgccgctgaaatacatatttttgaaggtggagaagtaggtctgttcaaaacgttcgtgatcgccaaacagcgtacgcgcctgacccggccaggagtcggtgattaccaggctaccttcggtggccccctccagcgggttaccttcgttatcgaccagcgccggttgcacgccgaagaacggacgtgttgcgctaccggctttcagctcggtagcgccaggcagcggggtgatcatgaaaccgccggtttcggtctgccaccaggtatcgaccaccggacatttctcgttgccgatttttttccagtaccactcccacgcttccgggttaattggctcgcccacggaaccgagaatgcgcaggctgctacggtcggtgccttcgatcgctttatcgccttccgccatcagcgcgcggatcgccgtgggtgcggtatagagaatattgacctgatgcttgtccaccacctgcgccatacgggcaggcgtcggccagttgggtacgccttcaaacatcagcgtggtcgcaccgcaggccagcgggccgtacagcaagtaactgtgtccggtcacccagcccacatcggcggtgcaccagtagatatcacccggatgataatcaaagacatatttaaaggtcagcgccgcgtacaccagataaccgccggtagtatgcagcacaccttttggcttaccggtagaaccggaggtgtagagaataaacagcggatcttcggcgttcatctcttccgcctggtgctgatcgctcgcttgctcaaccaggtcgtgccaccacaggtcgcgcccttcctgccagtcaattttcccgccagtacgcttcagtaccaccacatgctctacgctggtgacgttcgggtttttcagcgcgtcatcaacgtttttcttcagcggaatactgcgcccggcacgcacaccttcgtcggaagtgatcaccagtcgactgttggaatcaataatgcgcccggcaacggcttccgggctgaagccgccgaaaatcacgctatgcaccgcgccaatgcgggcgcaggccagcatcgcaaccgcggcttccggcaccatcggcatataaatcgccaccacatcaccttttttaatgcccagctcgagcagggtattggcgaagcggcagacgtcgcggtgcagctctttatagctgatatgtttgctctggctggcgtcgtcgccttcccagatgatggcggtacgatcgccgttttcttgcagatggcggtcaaggcagtttgccgccagattcagcgtgccgtcctcgtaccatttaatggacacattaccgggggcaaaggaggtgtttttcaccttctggtaaggtttgatccagtcaagaatttttccctgttcgccccagaaggtatcaggtacgttaatagattgttgatacatcgcctcgtactgctgagggtttatcaggcaacggtctgcgatgttggcaggaatggtgtgtttgtgaatttggctcatgcttttgttctccttgtaggatgttaataatatgtggcataagcgttaaatgtaggggtattggcagttttgtttagtatttgggcgacagatcacgcaaaagtagaattgtgcaaataaacggcagggtaatttttgaaggtcagcaacaaaagttgattaattctttgaggaacatgcagttatgcatgctgttgaaaaagaggaagatactgactaactctaaagtggtattttacatgcacttacaattgattaaagacaacattcacagtgtggttatttgttacacataggggcgagcaatgtcatgacagtgtaggtgcggttactgtcgtgaaaaacaataaaaaccgccattgcaacaatggcgcaattcggatgaagcccctatgacaaggataaaaataaacgcacgccgtatcttcagcttattgattccttttttctttttcacttctgttcacgctgaacaaacggctgctcccgcaaaacctgtaactgtggaagcgaagaatgaaacctttgccccgcagcatcccgatcaatatctctcctggaaagccaccagcgaacagagtgagcgtgttgacgccctggcggaagatccacggctggtgatcctgtgggcggggtatcccttcagccgcgattacaacaagccgcgtggacatgcttttgctgtgaccgatgtgcgtgaaaccctgcgtaccggtgcgccgaaaaacgctgaagatggtccgctaccgatggcatgctggagttgtaaaagcccggatgtggcgcgtctgatccagaaagacggcgaagatggctacttccacggtaaatgggcgcgcggcggtccggaaatcgtcaacaacttaggttgtgccgattgccataacaccgcctctccagagttcgccaaaggcaaaccggagttaaccctttcccgtccgtatgcggctcgcgcgatggaagccattggtaaaccttttgagaaagccggacgtttcgaccagcaaagcatggtttgcggtcagtgccatgtggagtattacttcgacggcaaaaacaaagcggttaaattcccgtgggatgacggcatgaaagtcgaaaatatggagcagtattacgacaaaattgccttctctgactggactaactccctgagcaaaacgccaatgctgaaagcgcagcacccggaatatgaaacctggacagcgggcattcacggtaaaaacaacgtgacctgtatcgactgccatatgccaaaagtgcagaacgccgaaggcaaactctacaccgaccataaaattggtaatccgtttgataacttcgcccagacttgtgcgaactgccatacccaggacaaagctgccttgcaaaaagtggtcgcggaacgtaagcagagcattaacgacctgaaaatcaaggttgaagatcaactggttcacgctcacttcgaagcgaaagcagcgctggatgcaggcgcgacggaagctgaaatgaagccaattcaggacgatatccgtcatgcccagtggcgctgggatctggcgatcgcttcccacggcattcatatgcacgcaccggaagaaggtttacggatgctcggtacggcgatggataaagcggcggatgcacgcaccaaactggcgcgcctgctggcgaccaaaggcatcacccatgaaatccagatcccggatatcagtaccaaagagaaagcccagcaggccattggcctgaacatggaacaaatcaaggccgagaagcaggacttcatcaaaacggtgatcccgcagtgggaagaacaggcacgtaaaaacggtctgttaagccaataaccccgttccgcctcgcaaggggcggaaaacacaatggagtgaatatgagcgtattacgtagcttattaactgccggggtgctggcgagcggcctgttgtggagcctgaacggaattaccgctacccctgcggcgcaggcatctgatgatcgctacgaagttacccagcagcgtaacccggatgccgcctgtctggactgtcataaaccagataccgaaggtatgcatggaaaacatgcttccgttatcaacccgaataacaaactgccggtcacctgcaccaactgtcacggccagccaagtccgcaacaccgcgaaggggtgaaagatgtgatgcgctttaacgagccgatgtacaaggttggagagcagaacagcgtctgtatgtcctgtcatctgccggaacagttgcaaaaagcgttctggccgcacgatgtccacgtaaccaaagtggcgtgcgccagctgccattccctgcatccacagcaagatacgatgcagacgttaagtgacaaaggacggattaagatttgcgtcgattgccacagcgatcagcgcaccaatccgaactttaacccggcgtctgttccgttgcttaaggagcagccatgacctggtctcgtcgccagtttctcaccggcgtcggcgtgctggcagccgtcagcggcaccgcagggcgcgtggtggcgaaaacgttgaatatcaatggggtgcgttacggcatggtgcatgacgagagcttatgcatcggctgtaccgcctgtatggatgcttgtcgggaagtgaacaaggtgccggaaggcgtcagccgcctgacgattattcgtagcgagccgcagggcgaatttcctgatgtgaaatatcgcttcttccgtaagtcttgccagcactgcgatcatgcgccgtgcgttgacgtctgcccgaccggtgcgtcttttcgcgatgctgccagtgggattgtcgatgttaatccggatctctgcgtcggttgtcagtactgcatcgccgcctgtccgtaccgcgtgcgctttatccatccggtcacgaagacggcggacaaatgcgatttctgccgtaagaccaatttgcaggccggtaagttgcccgcgtgcgttgaagcttgcccgaccaaggcgctgacgtttggcaatctggacgatcccaacagtgagattagccaactgctgcgccagaagcccacttaccgctacaagctggcgctgggaaccaaaccgaagctgtaccgcgtaccgtttaaatacggggaggtgagccaatgacgcagacttccgcatttcattttgaaagcctggtgtgggactggccgattgccatctacctgtttttgattggtatttctgctggtctggtgacgctggccgtgctgttacgtcgcttctacccgcaggcgggcggtgcagacagtacgttgctgcgcaccacgctgattgtcgggccgggcgcggtgatcctcggtctgttgatcctcgtcttccacctgacaagaccgtggaccttctggaagctgatgttccactacagttttaccagcgtgatgagcatgggggtgatgctgtttcagctctacatggtggtgctggtgctgtggctggcgaaaatctttgaacatgatttgcttgccctgcaacaacgctggttgccgaagctggggatcgtgcaaaaggttctgagcctgctgacgcccgttcatcgcggactggaaacattgatgctggtgctggcggtgttgttgggggcttataccggctttctgctgagcgcgctgaaaagctatccgttcctcaataacccgatcctgccggtgctgttcctcttctccggcatcagctccggtgcggcggtggcgctgatcgccatggcgatacgccaacgcagtaacccgcattccacggaagcgcagtttgtacaccgtatggaaatccctgtggtatggggtgaaatcttcctgctggtggcgttttttgtcggtctggcgctgggcgatgacggtaaagttcgtgcgctggtggcggcattaggtggcggtttctggacgtggtggttctggcttggtgtcgccgggctggggctgattgtgccaatgctgctcaaaccgtgggtcaatcgcagttccggcattcctgccgtgctggcggcgtgtggggccagtctggtcggcgtgttgatgctgcgctttttcattctctacgccggacagttgacggtggcgtaagccagaaaagaggtggtttctggacgtattccttcctgaagtcggttttctggcgttgttgttaagtctcggggtcaacgtgttgaccccgttgacggccttcgcgggagtgcggttgcgctggcctgccatgatgcgactcacttgcatcggcattctggcgcagttcgcgctcctgctgctcgcctttggcgtactgacgtattgttttctcatcagcgatttcagcgtcatttatgtcgcgcaacatagctatagcctgctgagctgggaactcaagctggcagcggtgtggggcggccatgaaggtagcctgctgctttgggtgctgctgctttccgcctggagcgcgctgtttgcctggcattatcggcagcaaaccgatccgctatttccgctgacgttagccgttttatctctcatgctcgccgcactgctactgtttgtggtgctgtggtccgatcccttcgtgcggatatttccaccagcaatcgaaggccgcgatctcaatccgatgctgcaacatcccggtcttatctttcatccaccgctgctttaccttggctatggcggtttgatggtagcggcgagcgtggcgctggcgagtctactgcgcggcgagtttgatggtgcctgcgcccgaatttgctggcgctgggcgttacctggctggagtgcattaacggcggggatcatcctcggttcctggtgggcctactgcgaactcggctggggcggctggtggttctgggatccggtggaaaacgcctctttattaccctggctttctgccactgcgctgctgcacagtttgtccctgacacgccagcgggggattttttgccactggagcctgttgctggcgatagttactctgatgctgagcctgctgggcaccttaattgtccgttctggcattctggttagcgttcatgcgttcgcgctggataacgtccgcgccgtgccgttgttcagcctgtttgcactgattagccttgcgtctctggctctgtatggctggcgagcgcgggacggtggcccggcggtgcattttagcgggttaagccgggaaatgttaatcctcgctacgctgttgctgttttgcgcagtgctactgatcgtgctggtgggaacgctttatccgatgatttacggcctgctgggctggggacgcctctccgttggcgcgccgtattttaaccgcgcgacgttaccgtttggtctgttgatgctggtggtgattgtgctggcgacgtttgtctctggcaaacgcgtgcagcttccggcgctggtagctcatgcgggcgtgctgttatttgccgctggggtcgtggtctccagcgtcagccgtcaggagatcagcctgaatttacagccgggtcagcaggtgacgctggcaggatacaccttccgttttgagtgcctcgatctacaagccaaaggcaattacaccagcgaaaaagcgatagtggcactgtttgaccatcagcaacgcattggtgaactgacgccggagcggcgtttttatgaagcacgccgtcaacaaatgatggaaccgagtattcgctggaacggcatccatgactggtatgcggtcatgggggagaaaactgggccggatcgttacgcttttcgtttgtatgtacaaagcggtgtgcgctggatctgggggggaggattgttgatgattgcgggcgcattgttaagcggatggcgggggaagaagcgcgatgaataaagggcttctcacgctactgctgttatttacctgttttgcgcacgctcaggtcgtagacacctggcaattcgccaatccgcaacaacagcaacaggcgttaaatattgccagccagttacgttgtccgcagtgccagaatcaaaacttactggaatccaacgcgccggtggctgtcagtatgcgccatcaggtttacagcatggtggcggaggggaagaacgaagtcgaaatcattggctggatgaccgaacgctacggagattttgttcgctataacccaccgttaacgggtcagacgctggtgttatgggcgctgccagtggtgttgttactgctgatggcactgatcctctggcgagtgagggcgaagcgatgaaacagcccaaaataccggtgaaaatgctgacaacactcacgatattgatggtatttctctgtgtcggcagttatctgttaagcccaaaatggcaggcggtacgtgcggagtatcagcgtcagcgcgatccgctacatcagtttgccagccagcaaaccccggaagcgcagcttcaggcattgcaggataaaatccgcgctaatccacaaaacagcgaacagtgggcgttactgggcgagtactatctgtggcaaaacgattacagcaatagcttgctggcgtaccgtcaggcgttgcaactacgtggtgagaacgctgaactgtatgcggcgctggcgacggtgctttattaccaggccagccagcatatgaccgcccagactcgcgcaatgatcgacaaggccctcgcgctggacagtaatgaaatcaccgccctgatgctgctggcttccgatgcgtttatgcaggcgaactacgcgcaagccatcgaactatggcaaaaagtgatggatctcaacagtccgcgagttaaccgaacacagctggttgagagcattaatatggcgaaattgttgcagcggagattggattaatcatctggtgatgaagattatgtcattgagctgcataaaaaataatcgaatgaacatatgccaaaaataatcactaatcagtattattgcagattaaacaaataaaaatctttccataacaaatggttattcattaatcctgccataaactcgcgttattatgcattaatgcagcgaaaagctctgttgttaaagggttgcgcaacataccgcgcaaatgatactgatcataagcgttaaaaaaatctacaaaccaacgcaacacaattcatgccccggcagtatgtcacgttctcgcgtttctgaacggggaacggcgctccattgaggaagtcattcatatgaaaaatataaaattcagcctggcctggcagattctgtttgctatggtgctgggcattctcctgggaagctacctgcactaccatagcgacagccgcgactggctggtcgtcaatttgctctctccggcgggtgatatcttcatccatctgattaaaatgattgttgtgccgattgtgatctccacgctggtggtgggtatcgcgggtgttggtgatgccaaacagctcgggcgtattggcgcgaaaaccattatctacttcgaggtgatcaccaccgtcgccatcattttggggatcactctggcgaacgtcttccagcccggtgccggggtggatatgagccagttggcgaccgtcgatatcagcaaatatcagagcactacggaagcggtacaaagcagttcccacggcattatgggcacgattttgagcctggtgccgacgaacattgtggcgagcatggcgaaaggcgaaatgctgccgatcatctttttcagcgtgctgtttggtctggggctttcttccctgcccgcgacgcatcgtgaaccgctggtgaccgtgttccgctccatctctgaaaccatgtttaaagtgactcacatggtgatgcgttatgcaccggtgggtgtgtttgcgctgattgcggtgacggtggctaactttggtttcagctctctgtggccactggcgaaactggtgctgctggtgcatttcgccattctgttcttcgcgctggtagtgctgggaattgtggcgcgcctgtgcgggttaagcgtctggatcctgattcgtattctgaaagatgagctgattctggcgtactccactgccagctctgaaagcgtgctgccgcgaattattgagaagatggaagcctacggagcaccggtgagcatcaccagtttcgtggtgccgaccggttactcttttaaccttgatggtagcacgctgtatcaaagtattgccgctatcttcatcgcgcagttgtatggcattgacctgtccatctggcaggaaatcattctggtgctgacgctgatggtgaccagcaaagggattgctggcgtgcctggcgtgagctttgtggtgttgctggcaacgctgggtagcgtaggtattccgctggaaggtctggcgtttattgctggtgttgaccgtatcctcgacatggcgcgtactgcgctgaacgtggtgggtaatgcgctggcggtgctggtgattgccaagtgggaacacaaatttgaccgtaagaaagcgctggcttatgagcgtgaagtgctgggcaaatttgataaaactgcggatcaataattgaagattgccggggatatccacccggcaatgtgtgaatgcctgatgcgacgcttgccgcgtcttatcaggcctacgccagacagcgcaatagcctgatttagcgtgattttgtaggtcggataaggcgtttatgccgcatccgacatcaacgcctgatgcgacgcttaacgcgtcttatcaggcctacgccagacagcgcaatagcctgatttagcgtgattttgtaggtcggataaggcgtttacgccgcatccgacatcaacgcctgatgcgacgcttgccgcgtcttatcaggcctacgccagacagcgcaatagcctgatttagcgtgattttgtaggtcggataaggcgtttatgccgcatccgacatcaacgcctgatgcgacgcttaacgcgtcttatcaggcctacgccagacagcgcaatagcctgatttagcgtgattttgtaggtcggataaggcgtttacgccgcatccgacatcaatgcctgatgcgacgcttgccgcgtcttatcaggcctatcttaaccgttggttaatttttcaaactcttcacacccggtatcaaacccttccatacagctcaggttcaaccagtgcagcgccttttgcttgttcttctcgataaaaccttcttcaccgtttaagaacatcattcccgcccagtactcggaataaccggttcgggaaattgcagagctgcgtttgaaataccaggttgccttgtcatcgtcggccttaatgcccacgccgttggcgtaaatcaaaccaagcagcatttgggcatcgacggcagagtcgttctccagatcttcgctggcgttttctaacaggctaattgcctttggataatccggtttacccgcttgagtatttaccagaatatgcgccagcgttacttcaccttctttactgcccgcttgcgccgctttctctgcaagaacttttgcttgtggatagtccagactgaccggattggtgattttgatctgcgccagcagcgcgcaggcatcagcatcaccgctgtcggcggctttctgtgcccaatattcggctttgctcaaatcgccggagctaaaccagctgtcggcaagaaaatattgtgcgcgtcggtccccggcctctgctgcctttaaatactggctgccaggctcggagtcgttggcgtgggcaaagaatgtcaaaaacaacatcaatgcgataatttttttcattttgataatacgattgggtagggagtaaccagtataaagagttcgaatggataaaaaaacagcctccgaaaggaggctgtagaaaggacggtattacgccagtgccgcttcgcgcaggcgagttttcaacttgttgtactcgtcaatcacgtactgctcggcggcgcgctgatcggcgatcggctcgacgcgaacggcgcagtatttgtactccggcgttttcgtaatcgggcttaagttttcggtaaccagctcgttacaggcaccaatccaccactggtaggtcatgtaaatcgcccctttgttcggacgatcgctgacctgcgcacgggtgataattttgcctttacggctgtgcacccaaaccaatgcctcatcttcaatacccagacgtttggcgtcttcggtattgatttgtgcgtagccaggttcatcagccagcgccgccagtgccgcacagttaccggtcatgctacggcaagagtagtgaccaacttcacgcaccgtactcagtaccatcgggtactcgtcggtgagtttgtcgattggcgctacccagtcgcaggtgaagaactgcgccagaccgttcggggtatcaaacttctctttaaacagataagaagtcccctgatcggcatcactagtatcgcggcaaggccactgaatgaagcccagttcgcccattttctcgtaagtcgcaccgtagaaatccgggcacagatgacgcaactcatcccagatctcctgggtgttgttgtagtgcatcggataacccatacgggtggcgatttcactgatgatttgccagtccgttttcagatcccatttcggttcaaccgccttgaagaaacgctggaagccacggtcagccgcagtaaacacgccttcatgctcgccccagctcgtactcggtaaaataacatccgccgcgctcgcggttttggtcataaagatgtcctgaacgataaccagttccagatcttcaaaggctttacgtactgcgctcagctccgcgtcagtttgtagcggatcttcgcccataatgtacgcggcacgcacttcgccatgcgctgcgcggtgcggcagctcgctgatgcgatagccggtatgcgctggcaggctttccacgccccaggctttggcgaatttctcgcggttagccggatctttcacgtactggtatcccggatacgtatccggcagcgcgcccatatcgcaggcaccctgaacgttgttctgaccacgaaccgggttaacacccgcatgcggcttaccgaggttaccggtcagcatcgcgaggctggtcagagaacgcacggtttccacgccctggtagaactgggttacacccatgccccacaggatggcggcgcttttcgcctgggcatacatccgtgccgcctgacgaatctcactggcgctgacgccggtgatatcttcaacgctctccggcgtgtagccttcaacgattttacgatactcttcaaagccttctgtacgactagcgacgaacgctttgtcgtacagattttcttcaataatgacatggcccatcgcattcaacagcgcgatgttgctgccgtttttcagtgcaatgtgcatgtcagcaatgcgcgcggtttcaattttgcgcggatcgcagacgataattttcgccccgttacgtttagcgttaattacgtgattcgccacgattgggtgggaatccgccgggttgtacccgaaaacgaacactaaatcggtattatcaatttcgttaatagcattgctcattgcgccattaccgacgctttggtgcagacctgcaacgcttgggccgtgtcagacacgagcgcagcagtcaacgttattggtaccaataacggcgcgcgcaaatttttgcattacatagttggtttcgttacccgtaccacggctggagccggtcgtctggatggcatccggaccgtacttctctttgatggcgctcaggcgctcggcaacgtaattcagtgcctcatcccaggaaacaggttcgagtttgccgccacgctggcgacggatcatgggggttttcaggcgcggggtcaggatctgggtatcgttaatgaagtcccagccataataacccttcagacacagggtaccctggttggttttcccctgcgctgcctccgcccggacgattttgccgttatcgacgaccaggttgattttgcaaccacttgcgcaataggggcaaaccgtgacgacttttttcatcggtctcgctccagttaatcaaatcacgcatacgcgctctcgactacagtatgcatcttttatgccacattttatgtggggtcattccctgatattacgggcactatttattcaaaactctgacgaaaaacaggctgtcgtcagttttgacgtgacgaaacgaaataccgcgtgacagccatcacgcggcagacattttattttttctcgacgacgggacctgcctgatacccgccgcccaggcttttcatcaactgaatgctttggatcacccggcggctgtccagcatcagtaaactcatctcttcggcaagcactggcaaccgggcttcggtggcctgtaagcggctggttaagccgcgctgataggcggcctcggcagcgcgctgggtaaagcgcgtggcttccacgcgttcagcctgcatttctcgctcgtcgttgagcgtttgcagacgcgtgccgttgacggcaacgtcacgcaccgcgttcagtacactctggttgtaacgttcaatcatcatgttgctggcggcgcgcgtgccttcgagattggcattcaaccgtccaccgtcaaacagcggcaatttcagacccgggatgaagttgaactggcgactggtttttttgaataaggtatgcagatggatggagtccagaccgaaaaacgctttgatatcaaagctcggatagaacaacgcccgcgcggaatccacctgatctaaactcgcctgaacataccagcgcatggcttgcagatccgggcgtctggcgagcaactcataagagagtgtcgccggaatgccggtctggacttgcggtaatgccaccggtctgatctccggcatatcgctggctcccgcgccaatcaatgcacgcagagattctcgcgtttcggtgatttgccctttgacggcaacaatttgtttatcgaccgccagaatctgtgcccgcgcgccgtggaaaggcacttgcgcttccagaccgtgcgccactttactctggtgcgctttcaccgcgtaatcaatcacatcgtgagtttgttctaacagatcgagcatctgatagctggcctgcatactgtaataaagctgcgctacgcccgtggccaggcttagctctactgctgcggtttctgccagcgcggcattatgcgcgccaatggcggcggcaaccgcactgcgatgcacaccccacaaatcaagatccagtccggcaaacaaacctactgtggcttccgtatagtacggcccgtccatacccagtgctggcgcatccatactataagggcttaaaaagccgttcgcgctgacacgttggcggttgagcatccctaacgctgcgacctgtaattgactaccggcatctaacaaatcggcctgggactgcgctttttcttcccgcagtttcgcttcggcgagggtgtgactaccacttagcgtccgttggatcagcgcatccagctgcgggtcattgagttgtttccaccactgcgcctgcggccagccggagctggcaagatgaatatcgtcggccagtttgatttgttccggtttgagctgttgatgaggtgcagaatccttacgtaccagggcacagccggaaatcagcgtcgtgctgccgagaatgctgcacaacagcagacgactaagttgacgattgatcattgcgtggctccttgtgcctgttccgtggcgggcgttaatgccggggctgtccagtctggcaagcgggcgaaaagctggcagacgtgttgctcctgttttaataaggtgggcaggatggcctgagaggcgggtgtctcttcaagcgttatttgaggagaacggctgagtgcggttgccagaccggcagcgtatttctccagggcgtcggcaaactgacctgctctgtccggctgtagtgcgttatccagcgcctgcgcgctgttccaggtggcatcccaggcgtgaagaagatcgcggccctgacgaataaccgtttggctacgttcaatcagtaatgcgcgttcttcgctgtccagttgacgctccagcgccacgcgttggcacatctcttcacaggcattaaacgccgcatgcagaccgatacgaatttgcagataagtgcgcagagccgtgacttcctgctggcgtgggatccgcattactttacttaacatacccagcgtgccagccagtttttgcggcagtgtgcgcgcttcactttcaggccagacaaaggtgtaaatcaccgcggacaccacggtaccaatgatgatacccagggcgcgatcgcgaatttccaccaggtcgtacactgggccaaaaacgttttcgagcgtggcgagcgcgaaggtgaccaccatctgtgtgccgatataagaagagcgttcagagctggtggcaatccatgcgcccaacaggaaaatcggtgccagcacaaacagcaattcgacaatattgtccagccagggcatgaccagtagcgtgaataacagcgccagaatcgcgccgcaaaaggccccgccaaaacgcagcaccatcttctggtagctgctaccgacatttgggttagcgacgatcacgcatgtcagcatacaggtgtgaatgccttcccagtccacgccgctgtaaaaggtgtaacagatcaaacaggcgagcagcgtttttaccgcgtagcgcatatagtctggattggtaaaagcatcggcggccatacttggcggtttggctgcgggcgttggcggcgtattcgggtccatctgacccagttgtaacaacgtctggcagatattctccaggttacattcccgtgccgccatcgcttcactttcactgatccgccagtcgctttgccagcactgaccttcagcaacggcatgctgcagcttgttgatttcactagctaatttttgtcggaattcaataattgcctgagaatcagcaaaagaggtgggatcgtagcgattcagcgtgctgtaaatgtaggttaccgttgccacgcagctttgccaccatgcgttttgagttcgccagttggcatcgtccgcgaggcaaaagacattgagtttttgtagcgccagcgcctctctttcaatccgcgtttcgggtagcggtgcgaggctgtctgtcaggtgactaatggcatcatcaagccgatcattaagcgcctgatgcatttggctaatggcacgactgggaaaccacagcacgccgattaacgtcatcagcaaggttggatagaggccaacaacgatacaccacagcgttaagcgcacgaccacttccggatagtcgagcatggcggggaaggtttgcccgtaaatagcgacaatggcgacggcgaaaaagaccagccccaagcgatgggtgcgcatcaaaaacatgcagcccatcaggatcggtccggcgatgatcaatcggatcaacggttcgccgtaactccatttgtagatcaaaaacaggctgccgatctccagcaccgtggcaaccacaaacaagatcgcgacaaatttggtgtaaaacgcgttgctctgaataccgtaaaacagcactgccaggcttaacgccacaaaagggatctcaaaggtcatgctgatcagaatcaccagcaggcagcctacccagagttgcacggtctgcggcacgcgacctggtcgccgctcgcttaactcttcatgaaagaacgccagcagcctgaccaccggtaatggcagggagttgagcgcgctcattattgcggctcaagattagcgactgcgctagcgccgatgcggaacatttccgggtcaggtttatcgaccatgattttgaccggaaaacgctgggcaacgcggacccagttaatagaacgagacactttcggcaggccgcccagcaccaggccgccgtcatccggtagcacgccgtagccaatgctatccactttaccctcgaaggttttgccgctgtcactcatcaggcgaatcgttgcgggtgtaccactgcgaatatttttcagatcggtttcgcggaagttggcgatcacataccagtgacgagtgtcgattagggtaaaaatagggcgcatggcagaagcaaattgcccgacggaggttttgagggaaatgacccggccatcaaacggcgcgcgaacggtcgccatttccagatgcagtttggtcagggcaatatccgcttcgaccgccgcacgctgggcaactaatgcatccacgccgctgacggcgctggcggcactctgcgcctgtaacaatacggcattaagatccgcttctgcggcgcgctgcgccgttcttgcacggtcaacatcttccgcactgacaaaaccttctttcagtaatggctcggtgcggcgtaatgtatctgtggcctgtttcgcggcggcacgggctttttctaccgtggcattaacgctgtcggcaccaaactgttgcgcgtcaacgctacgctgggtgagcataatttgcttatccagcgccgcgagggaggcttcagctttcgccagattggcttcgtacgggcgcgggtcgatgcggaacagcaaatcgccctgtttgactgcctggttgtcggtgaccgccagttctacaatgcggccgctgacttccggtaccacatcaatggtatctgcactcgcgtaagcgtcattagtacttggcgcactgtctacgcgccagataacgaaaacaagggcaaccagcgccaacgcaaccactaacagagcagggaatttactgcgaggagcttttttcggcgtactttccatgagcgcgtctcaaatagattagaaaaatgccagccagaacagcatggcgtagagagcaaaaagggcggtataaataattccgacaaatgccagattgatatttgcccgctgaataactcgcctcgtgatgagcgtcaaaataaggctggcaatggcgcagaaaaaccagctgggataataagcgccgatcaccgggattgccggagataatgagcatcccgaaaccatgaagacgggaattatccaggctgtttttttgagttgcatcgccatgcgagagagaactgttggcatattaaatacatcctgtctgctgcgaacaatatctgtagtgaatatcaatatccattgaaggcgtcagtatggctattttcttgatgaataaaaatagctttattcagccaccgcattcataacttatatattttatttattaattggctgtatatatttttaaaataaatacttttgggggcttcagcgcccccaaaagcgagtgacattaatttggggttacgatattcacccacaaatcgaaattatccagacaggcgataatttcttccagtttcgcgccattgccaataattttggctttcttcgcttttaccagatccgccattttggcttgtccggtcagcacggcgtgcagatcttcacggctgatgtagaaagaggcgtcggcttgcggttgcagcgttttccggtagttaagcacgctatcgttcagcgtcaggttgaggttatcgccgttgctcatattgaagttcaggctgatatttttacccgcagctttcgcgctatcgaggcgaacggccataaagtcgaacagcatttcgacgctcatcccgcgaatggtgtccggggaaccggtggtgccgtggctgaacttatgcaccccttcgcgcagctctttcgcgccggtcaggtagaaaccgcgccatgtggcggactcggcctgatagcccagctgttcaaagttattcgcttgcagattcttcgcgacctggtcacccgggttggcggcaatcacctgtttcagcagttctgcgctccagcggtaatcaccttgcttgttcgcttcttgcgccaggttgatgacacgggcagaaccgcccagcgcctgcacgtaacgtttacccatctccacctgaccatacggatgcaggttagccgggttaccgtcgtaatagccaagatagaagttatacaccgcgcgggcgttgtggctgacagaaccgtaatagccgcggctggcccagttattggcaagtgcaggcggcagcttaatcatgtcgccgatttcattcatggtgtagccctggttcgccaggtgcagggtctggtcgtgaatgtacttgatggtatcgcggtatttaccaatataatcattgatatgcttattgccccagaccggccaggtgtgcggcataaacagcacttccgcgtcgttaccccacatatccagcgtttcgttcagatactcggtccacttgctggtgtcgcgggttttcgcgccgcgcagagtgtagaagttgtgcagggtatgcgtggcgttctcggcggtacacagggctttcagggccggaatatagaagtgcatttcggctggcgcttcgctacctggggtcatcaggaagtcaaactccaggccgtcgataatcatcttctcgccagttctgacgatagttttcgtcggtgcaataatgctcgggtcgcccgttgccagcgtcacgccaaggccattacccacattgccttgcgcgttgtgcggcagtaacagaccgtaagagtagagcgcacggcggctcatgatgttacccgccagcacgttttcgctgatggcttcgtccataaagcctgcaggggcaatcacctgaactttgccggatttaacatcggcttcagagataatgcctttcacgccaccatagtggtcggtgtggctgtgagtgtagataacggcaacaatcggtttttgcggacgatgctggaagtaaaggtcaagtgcggcttttgcggcaggcggcgtcaccagcgggtcgataacaataatgcctttctcgccctcaacgaacgtaatgttagagatatcctggccgcgcacctgatacattttatcggtgactttgaacaggccagaaataccgttgatttggctctgacgccacaggctggggtttacggtttccggcgctgcggcattaatatcaaatttgtaatcgtccgcgcggtagtaaactttaccgttcgcatcacgcagaataccttcatccagcagcggggcgataaatccacgctgggcatcgtcaaaatcctgacgatcgctaaacggtaaacttttggcgtaattctgattaacctgttgggtatattgagtggcggctttcgcttcctctttcgcgttagcggtatttaccatcatgccgctggcggcagttaacgcaataacaatcctgctcaaacggaataaccgagagttattcatataaatctccatttatcatttatgtcgtaaatatgtaatccatgcaaaatacgtcatttaaagctggcgttatcataattgggaaattgcgactttaataagtggaagtgtgagcggaacgcgccattttattaggcatttgtgctgaagagggaaaattacagtaaaactatcattgcagaaaataatatgagtcgttttatgtgtttattatatatattgtacctgtcgttggcacagcgggacattgcgctactgtgccaacgttttactcatggggctttagcacagaactgtggcaaaaaacgttgatgcgccaatattgctgcaccctgagcgccattaaagtcagaagaactggcggcaataaagcgcacgacctgatgcggcagtggacggcgcaggtacttttgggtcatggcaacgagagtctcgcgtgggaaggcgggcatatccatcacgccaccgcccaggatcaccgcatcgggatcgaacagattaatgctggtggcaatggcccgtgccgcgttttcaagcagactctggacgaaaggggcgttttccgcatggacgaaaagatcgcgcaatgggtaatttcggggctgttgttcgtaccagcgtcttagcgccattccagagcaattggtttccaggcacccaggattgccacacgcgcagtgttgggtcatatctcccagggggatatgacccagttcgcctgccacaccgtgtgcacccgtccacggcgcaccgttcatccacactgcgaaccccatccccgtaccgagataggccgccagaaccagttgttgcgtaaggcggttttctactacgtcccaggagagttgcaggttaacgtcgcgggaaaactcaaccggacaattcagcgtattttcgagcttatcggcgagatcatataaatccgccgctgttaacggcaggttaggcgtagaaataatggtgcgtttatctttactgaccagcgccggaaatcccatcaccagaccatgacagcgagcgttaaagcgcctgagttgctcgtcaatcatttcgccgataccgctcaccaggccgggagcaatgacttctgcggtccgctttttttcgcagtgtagcgtttcaccttctgctgtccgcagacaaaagcggatatgcgttgcccccatatccacgcccgctacgacgttatgctgtttttgcatgaggctgtacctcgctttttgcagccagaatctgcgcggtcataattctccatgcttcgtcgatattttccgcatgattaaacaggccggaagtgccgacgataaagacatccgcccctgccgccatcagtttttcgtaagttgcctggttgcaggaaccgtccacctcaatttcgtactccagaccttctcgttcacgccatgccttcagttcggcaagtttatccagcatttcaggaatgaacggttgtccggcaaagccgggatcgacagtcatgaccgtaattttatcggccttatggatatagtatttcatggcctcaactggcgtctccgggttaaggatcagccccactttcatgtcatgacggcggatttcatcaatcaggcggaacgcctggccgttgatggtttccggatgcagagtgatgaaatctgctcccgcacgcgccagttgagcaatgtaatcctgcggccgcgtcaccatcagatgacagtcgagcggtttagttgccagttttttaacctgacttacgaagaacggactgagtgtcagattggggacaaagtgaccgtccatgatatcgatgtggaagtaatcggcatggctgtcgataaattcgatctgttctttaaatttcagcagatccatacacattaagctgggggagattttcatgttcaattccttacttactgataagacggtcaagggcgacagccgcgataattaatccgcccatcaccaccagttggtaataggtttgtacctgcaaaatattcagaccgttgttgatggtgccgatgatcaacccgccaatcaccacagagaaaatgcgccccttgccgccgaagaaactggtgccgccaatgatggcgctggcaatggcataggtttcaaaacccataccggcaagcggttctgcggcaccgagtcgtgcagtactgacgacgcctgccagacctgcacaaacaccggagatgataaacaccaccaggatgtggaatttcacgtcaatcccggaatagaacgcgctatttttgttgccgcccagtgcgtagatgttgcgcccgagccgcatacgcgttgtcagaaaccaaaggatgagcgcgacaattagactgaagataacggggacaggtatcccaattacgctggcggcaaagaagttcacgaagtcaaaactgaagccgtatacgctgttggcatcggagatcaccagcgtgatcccacggaaaatcgcgttggtgccaagggtgatgatgaacgggtgtagccccgtccagttgaccaggcagccgttgatcgcccccagtgcgccgccaaccagtacaccgccaatcatcgctgcgagaaacgggtcaacacctgccaacatcagtttggcggtcaccataccggaaagcgccagaatcgcgccaacgctgaggtcgataccagcgaccaggatagcgaaaaactcgcccatgccgatcaataccgtcacggagctttgaacaaaaatctgggtaatattattggtggtcagaaaatattctggactcaggctaccaaagatggcgacgatgatcgccaggataaaaaaggtgccgtatttatcccagaacagcgcaaagttgaacggtttcttctcgctcgcttcgctttttactcttgtggtaaagcccatgccataatctcctcttcgctcatgtcatcgcgattcgtcaggatttgcgtcagtcgtccttcgcagaacacggcgatgcggtcgcagacggtgataatttcaggtagttcagaactcaccatcaggatgacttttccgtcgtccgccagttggcgcatcactttgtaaatttcggctttcgcgccaacgtcgatgccgcgggtaggttcatcgaaaataatcacttccgggcaacagcacagccatttggagatcaggactttctgctgatttcccccggagagttcggtgatattctggtttacgctatgacatttcagcgccagcagttcgcgttgattttcagcggtacgttgctcgtcaacttcatgaaacaagcccatcgcgcctttatagccgccgtctttcagactgcggctgatcgccatgttctgagcgatggaaaagttggggaaaaaaccgttatcccggcggctttcagtgatgtaagccatcccttttttcacggcatccaggggactacgtggagagatatctttgccattaagacggatttctccgccagcgcgtttatccacgccaaacagacaattcatcagttcagtacgtccggaaccgaccagtccggcaaagcctaatatttctccccggcagacgctaaaactgatatcccggaccttttttctgtcacgactggtgacgttccgcacctcaaaaaccgtttcgtgcgcaaggttgctgacattctccttcatcgcgttaaaacggttttgcagttcgcggcctaccatcagacggacgatatcgtcattactcacatcgcttactatgccgctgcaaacgctgctgccgtctttcatcaccgtatagcggtcgcaaatacggcgaatttccgccaacttatggctgatatagacgatggccgtaccctctttacgcaactgattcatgatcagaaacagatagtccacctctttattggtgagactggaggtgggttcatccatgatgatgactttggcatcgagcatcagcgttttggcaatttctagcatctgcttgtggctgatagataaattcgccactttctcatctagatcaactttcaagcccacgcgtaataacatcatggcggcgcggacacgcatttctcgccagtcgataatattgacgccacagatttttttcgtcagatgacgaccaatatataaattttccagtacggttaattcatcaataacgctgagttcctgataaataatcccgataccgagttgtgccgctaatttatgatccagcttgttatagctaatgttattaatggtaatggtgcctttggtcggctcatgtattccggataaaactttcattagcgtggatttacccgcgccattttctcctagtaatgcatgtatttcaccaggataaaccgttaaattaacgctctttaatgcgtgaaccggaccaaaggacttgccgatccccgccatgcttatatatggcgtggccataaataacctctctgcacgaaatatcgtattattgcctgatggctacatttatcaggtctacgttcaggttattttgttggccggataagacacttcattagcatcatcatccggcatcattcagttttattgagtgaccaggatactatcgaccagtttaaattccggtgctttatccagcgggataaccttgccggatttctcagcgtcaaccatcagcttcagacccgttgcgccgatatccgccgggttctgggcaaccgtcgcggtcatttgtccggcttccaccattttgcgggcttccggaatgccatctgtaccgacgaccagcacttttcccgtttttccggcgtttgcgactgcctgagcaacacccattgccatcgtgtcattcgcgcaatagatcgctttaatattcggattacgttgcaacacgttagtggcgacatccagtgctttaatgcggtcccagtcggcaggctggctggcgacaagcttgatctggcttgcttttttgaaggcttcggtggcaccattacgacgcgcttcaccggaggcgttaccggctttaccctcaatgattgcgacttcaccaccttcagcgcccaatttgtcaataatgaagctcgcgcctttcgccccgacagcaacgttatcggtggtgacaaaagcttccacattgccgccagcttttttcagattatccatgtcgattttttcatcgagattaaccagataaatgccttttttccatgcgcgggcgacaggcatgaccagattcacactggataatggagcgaaggcgatacctttgtaatttttattactgagatcttcaaataactgcaattgagattgaaaatcgccttcactaggagaggcaaaaatatcaacgctgacgcccagtgtttttgcttcatcttcaatgccttttttcatatctacccaaaatgggttggagagggttttcaatacgacagcatattcggcggcagcaaaagcgctggtactcaacattaagcccacgagtgtgccgctgaaatatttcagatatttattcataataatgttctcacggtaaggggacaggtaactccgcgatggcggaattacctttttcttatttcagcgcgcctggactgaagaaatcaacaattgcgccggttttttgcatattaatattagcttgttcaatgttgagctgggcgacagagacaaaaaaagcgtccagcaaagttagttgtaatattcttgcgctggcattacgacctaataacggcgtttccggggctggactgcaaataatataatcggccagtttcgctatcggactatggtagctatgggttatacaaataatctttgccccgttcttttttgccagttctacggccgcttttacatcactggttcgcccggaatgggtcactaccagcacaacatctccttcctgtaacaagctagcggacatcatcatgatgtgagcatcaggataggcctgacagcgtacgccaatgcgcaagaacttgtgctgtacatcagcacagatagcattacttcctccggcaccgtacaaatcccgctgtctggcctgatagaaaaagcgggcggcacggtggatctcatcaacgttgacgatgctctgaccttccataatggtgcgtaaagtgatgttaaataccttattcaccacatcctgcggcgcttcatcaaaagccaactcggaaggcaatacctgttcactctgagaaaaataatcttccagcgcactgcgtaagttacgaaagccgctaaaccccagcagcttacttaccttaactatcatcgcttcagataccgccagagcttctgcgacatctttaattgcgggtgcacaactcaggttaccgggtttgagtaaccactccacgatgcggctttcattttctgtcattccttcctgcttcattcgcaggtaaggcgctaaccctataccgttcggaagcgcactatcaaactcactctggctcatcacgttctcttgtccttgaattgaagacgccactatatcaccacagcaagaacagaaaagatgctggcgacttcacaaaaaaataaaatttataaagtttattttattgtgaacaatggcgagtggcttaaaattttatttcatttaattagtttaaaaacatgatgttatttgtttttctggttttttagatgatagatgttgctggatggtgagtgtctttaacgctattgcgctgtcagatgtaactctgtaaaacagatcaggaaggcgtaattcatcgattttgggtgtttttaattcattaacatcacaaatgttttttgattgtgaagttttgcacggacggggaagatgaatgaaaaagattgcatttggctgtgatcatgtcggtttcattttaaaacatgaaatagtggcacatttagttgagcgtggcgttgaagtgattgataaaggaacctggagcagtgagcgtactgattatccacattacgccagtcaagtcgcactggctgttgctggcggagaggttgatggcgggattttgatttgtggtactggcgtcggtattagcatagcggcgaacaagtttgccggaattcgcgcggtcgtctgtagcgaaccttattccgcgcaacttagccggcagcataacgacaccaacgtgctggcttttggtagtcgagtggttggcctcgaactggcaaaaatgattgtggatgcgtggctgggcgcacagtacgaaggcggtcgtcatcaacaacgcgtggaggcgattacggcaatagagcagcggagaaattgagattcatccactacttgcatggatgagtaatgattaatgtggatagagtttctttttgaggttggctaatgaaacgctttccgctatttcttttattcaccctgctcacgctgtccaccgttccggcccaggccgatattatcgacgacaccattggcaatattcagcaggcgattaatgacgcttataaccctgaccgtgggcgagactatgaagatagccgcgacgacggctggcagcgtgaagtgagcgacgatcggcgcagacaatatgacgaccgccgccgccagtttgaagatcgccgcaggcagctggacgatcgccagcgccagcttgatcaggagcgtcggcaactggaggatgaagagcggagaatggaagatgagtatgggcgatgaggttgggtatggagcaggcatcgcccctcaccccaatggggagagggagaaaacgagcgcaatattcaatatcgagcacaatcggtcccctcgcccctctggggagagggttagggtgagggggccagcgcgcacattccctctcatcacgccaccccaatctccatcccatcaaaccccacctcaaacccactcggtagtgcgttttccatcagccacgcatcaaactggtggctgatatgggtcagaatcacccgtgggctgcggataacctgattcagcgcaagcacggtatttaaatcacagtgattacgcggtgcatccgcgcgcggcgggtgactgcaatccatcaccattacctgcggctgattattgcgtaaaaatttcagcgttttttccggcaagcctgcggtgtcagacagccacgccacccggctgtgtgccgtttccagcagataaccgaaggtcagtttactgtggttgagcggcaggggcgtgacctgtaacccctgcaaatcaaacaccacaaacggttccaccgtgtggctgaaatcaagcaggcccggatgtttaaacagatcgtcgcagccctgttcatccggcgggccgtaaaccgggatcggatcgccaacgccccagcgcagcggaaacagcccctggacgtgatccatatgataatgcgtcagcaaaaactgctggaagcttccggggctccagcgatcggcgagatcgtgcagcccggcgtcgatcagggtgattgcgtcgttaaacttcactacgccgctgcacggttggcggcgatactgcgggctgcgccgcgctctggcgcaggccgcacactcgcagccccatgccggaacgccctgtgcgccgccggtgccggtgagcgtgagggtcaggctcatgttacagcgccttggtgaagcggaagtggctctgctcgtagccttcgcgcagatagaaacggtgcgcgtcgtggcgcttcacgttggtgctaagttcggtcatttcggccccggcctggcgggcttcttcttctgcccacgccagtaacttactgccgacgttcagaccgcgcgcctgcggcattaccaccaactcctgaatttcgccgatccagttgacatgatgcagatgaaactgcaaatgcaggccgatcatgccgacaacttcgccatcaagcagcgccagatggtagcgcatgtttgggtcgcgcagattggcgttaaaacccacgcgaaacgcgtggtggtcaaactccgcctgttttagctcacaaatcagcgcgtaaaccgcgtcggtgtcgtactgcgtggccgggcgaagctcacaagcaggcatggtgtttctccttctgatggatcagcgtcagcagcgtgtcgacgctctggcgcaggctgccgtcattgttgagcgtatggcaatcctgtggagtatagcgggcggcgcgcgccaggcgggcgttaatttcactggcgttttcacggccacggttttccaggcgctggcggaggatctccgggctaacctgtaaacagacgggcagcagcgcgctttgatagcgcgcccgcgcctgcggcagatgggcgcgactgccgttgaccagcacgtcgaatccggcgtgcagccagagatcaatctcgacgccgacgccataatacagaccgttagcgtgccagcttaaggccaacagattttgccccgcgcgggtaaaaaactcctgctcgctcagggcgatatggttttcacttccggcgctggcatcgcgcgtgatgtagcgatgcgccaccagtaactgagtttgttcccgcaggcggagttccgccagcaggctgtctttcccggagccggacggccccattaaccaaatcagttttcccatcatcagaacacccttttaccctgacgccagacgtggtcgatatgaatatgattgtccttgcgatgcgccagcaccaggtcggcgcgtttgccctcgccaatcaccccgcgatcctggagattaagcgcctgcgctggatttttagtcaccagcttcaccgcctgcggcagcgtaaagcggttgctctggtcatcggcgacgcgaaatgccgcatcgagcaggctggcggggtagtagtcggaagagaggatatccagcaggccaagctgcgccagttcactggccgccacgttgccggagtggctgccgccgcgcacaatattcggcgcgcccatcagcacgttcatgccatgcttgcggctggcttccgccgcttcgaacgtggtgggaaattcggcgatcacgctgccaagctggtgagattcagcaacgtgggcgtgggtggcgtcatcgtggctggcaagcgcaatttttcgcgcgcggcacagggcggcgatggattcgcgattcggctggctccagcgtgcggcgagcgccagttgctcttcttcgtactgctgcatctgcgcatcagtgagggagtatttgccctgataatattcgcgatacttctcgcggttggcgaactggcgctggcccgggctgtggtccatcaggctcaccagcgtcaccggctcgcgctgcaccagtttttcaaacagcggcagcgtggtgtgatgcggcagttcgcagcgcagatgcagacggtgctcggcgcggttgacgccgcgtttctgcgtctcttcgatggcgttgatcatcttctccagattctccagccgatcgccgccgtcgcgcacgtcgccaattgccacggcatccagtacggtggtgatgccgctcgccaccatcagcgcgtcgtggctgctcatcgcgctgtgggcaggccagtcaactttcgggcgcggggtgaagaatttatccagattatcggtatgcagctcaatcagccccggcagcagccagccgccttcgccgtccatcgcctccggcaggcggctctggctttcggcaaaggcgcggatttcgccgttctgcacctccaggctaccgcttaccacctcgttttccagcaccagcttaacgttattgataatcatgaagaggctcccattgggtgttagctcaactagaggctcccattgggtgcaggcggtcggcgacgtcattacgtacagcttcgtcatggaagatgcctacgatggctgcgccacgggttttggcttcgcgaatcagttccaccaccgcggcgctgtttttggcgtccaggctggcggtaggttcgtcaagcagcagaatggggtagtcgacgataaagccgcgggcgatgttgacgcgctgctgttcgccaccggaaaatgtgcttggtgccaggtgccacaggcgttccggcacgttcaggcgggtgagaagacgcgcggctttagcggcgcaggcttcacgcggaacgccggtatcgagcagcggctgcatcaccacttccagtgcactgatacgcgggatgacgcgcagaaactggctcacccagccgacggtggttttgcggatttccaccactttgcgcgctggcgcggtgaccaggtctacccactcgtcaccgtgtttgatctggatttgaccttcgtcgggcagatagttggcgtacaggctgcgtagcagagtacttttgccgctgccggaatggccgtggagcaccacgcattcgcccgcgttgacggtgaggctggcgcgattgaggacgggcaggcgcacgccgttttgctggtgcaggatgaaggttttactgacgttttgtacgttaatcatttttcgcctcgtggttcgggtgtcggatgcgacgctgacgcgtcttatccgacctacggggagcgcatttgtaggccggataaggcgtttacgccgcatccggcaccggctcaattctgcaaaacgctactcaccagcagctgtgtatacggatgatgcgggtcgtcgagcacgcggtcggttaacccactctccaccacttgcccctgcttcatcaccagcaaacggtccgccagcaggcgggcgacgcctaaatcatgggtgacaatcaccaccgcgaggttcagctccaccaccaggccgcgcagcaggtcgagcaggcgggcctgcacgctcacatccagcccgccggtcggttcatccataaacaccagcttcggatgcgtcaccaggttgcgggcaatctgcaaacgctgctgcataccgccggaaaaggtggtcggcaggtcgtcgatccggttggcgggaatctccacctcttccagccacttctgcgcggtggcacgaatatcgccgtaatgacgtgccccggtcgccatcagccgctcgccgatattgccgcctgcgctcacctggcggcgcaggccgtcgagtggatgctgatgcaccacgccccattcggtacgcagcaggcgacggcggtcggcctcgctcattgcatacaggctacggttctcgtagtgaatttccccctgctgcggcgtcaggcgcgcggagatgctcttcagcagcgtggtcttcccggagccggattccccgacaatgcccagcacttcccccggccataaatcaaaagagacatcgctaaagcctttgcccggcgcgtaaaggtgggtcaggttattgacgctaagtaacggttgattcattggttttttgcctcgctctgttggcggcaataatcggtatcggagcagacaaacatgcggtttccggcgtcatccagcaccacttcatcaagatagctgtgggtgcttccgcagatggcgcatggctcatcccactgctgaacggtgaacgggtgatcgtcgaaatcgagactttccacgcgggtaaacggcggcaccgcatagatgcgcttctcgcgccccgcgccgaacagttgcagggcgggcatcatgtccatttttgggttatcgaatttcgggatcgggctcgggtccatcacgtagcgcccatttaccttcaccggataggcgtaggtggtggcgatatgaccgaagcgggcgatatcttcatacagtttcacctgcatcacgccgtactcttccagcgcgtgcatggtgcgggtttccgtttcgcgcggctcgataaagcgcagcggctcggggattggcacctggaagataattatctgatcttcggtcagcggcgtttcggggatgcggtgacgcgtctggataaccgtcgcatcgtccgtacgttccgtggtgtttaccccggtcacgcgcttgaagaagttgcgaatgctcacggcgttggtggtgtcatccgcgccctggtcaatcaccttcagcacgtcgctttcgccaatcacgctggcggtaagctgaatgccgccggttccccagccgtacggcatcggcatctcgcgcccgccaaacggcacctgataaccggggatcgccaccgcttttaagatggcgcggcggatcatgcgtttggtctgctcgtcgaggtaggcaaagttgtagccgctcagattagccatggttctgctcctgttgcagacgtttgagtagctccagttcggcctggaaatcgacgtagtgggggagtttgaggtgactgacaaagcctgcggcttcgacgttgtcggcatgtgccagcacgaactcttcatcctgcgccgggcctgtcgcgtgctcgccgtactccggggcttgcagagcgcggtcgaccagcgccatcgccatcgctttgcgctcgctcatgccgaacaccagcccgtagccgcgcgtgaagtgcggcggctcacccggcgggtcgataaaaccgttaaccatttcacactcagtcatcagcagttcgccgacgttcaccgcaaatcccagctcttccggcacaatgctcacgtcgatatagccgctgcggatctcgcctgcgaacgggtgattgcgcccgtaaccgcgttgggtggagtaggccagcgccagcaaatagccttcgtcgccgcgcatcaactgctgcaaacgggaggagcgactgcaggggtaaaccggcggcgtgcgggtgatgtcatccggctgtgcgccgctatcctcttcaaacttcgccagcccctgacgcgccagcaggctgaaaacgtgcgggctcggctgctgttcgctgtcggcggtggtcagcgtcggcgcttcgccgtttgccagcagggtaaaatcgagcaggcgatgggtgtagtcgtaggttgggccaagcagctggccgccgggaatgtctttataaacggcggagatacggcgttcgagacgcatcccggtggtgtcgagcggctcgcttaccgccagcttcgccaacgtggtgcggtaggcgcgcagcaggaaaatcgcttcaacgttatcgccgctggcctgtttcagcgccagcgccgccagttcgcggtcggcaatgccgccttcggtcatcacgcgatctaccgcgaggttaagctgctgttcaatctgggcgacgctcagttcgggcaaatcggtatcgcctcggcgtcggctctcttgcagggcgtgggcggcgtcgatcgccttctcgccccctttcacggcaacgtacatcagcacacctccacatgagtggttcgcggaatagccagcaggcgctcgccacaggtcaggatcaggtcgatgccgagcgggaacggatgcgggcgctcggtgagttcgtgcagaatgcactccggcagctgcggagcgatcattcgttcttcggcaatacccgcaccagtaaggcgcaacatgcgtccgccgctcaggctggcgacctgtaaaatcagcgtcgcacccgcttccggcgcaacggcggtgccggtggaaagggcgttgagctgttcgctggaaatcgcctcatccgtcaccgcgaaggtcgcctgttccggctggctgaccagcggcgcgttggtatgaaaacgcaggctctggttgacgatatcgttatttaatggggtagaaagccacaccggcgtgtcgttatcggccagcgtcagcagcacgctggtggtggcgatattcagcggttgccagccgcgtttgagctgatgcagggcgacaatcacgcccggctcgctcatggcctttaacaggcgacgaaaactgtgctgggcatcctgcacgggaagcataaaagcggtttccagggtcatgcgttgtctccgcgaaccatcgtaaagaagtcgacccggctggcgttcacttcggcctggcgtgcggcaatgcgtgccatacggtcagcgtccagcggggcaataagggtttcacttaagttttgaaagtggcgagattgctgcatcagcgcgtcaatcagcgcgcagcgttcggcgtgctgtttatcacgcccctgcacccagctgtagccgagcgtgccgtcagtcaggcgcacggcggcgcgggtcagcgtggcgtcgccggcaaaaaaacgttcgccggtgccgcccatccgcgcctgaatctgtaccaggccagtttcagcggcgcggatcacctcatagtcggcggtgatgtttagcgcgttcaggcgtgctgccagttcagccggttggctgtgcgccagcacggacatccagtgctggcgggtcgcggtatctgcgtgcattcagtgctccatagtgaattcaatcatgtcggcgcgcgtcaggctgacggagtactccgccgggctgctttcaccgtcacggtggttaagggtgcgcacgcacagcagcgggctcatattcgggatttcaagacgctggcactctttggcctgggcgcggcgggcgctgatccgcgtctggctgcggcgcagcgcaattccggtttgctcgcgcagaaaatcgtgcaggctgccgctgtcgaagcgttgcagcgtcggccagagggtgaggtccgcgaagtagtggtcgattaaacagagcgcgacgccgttgacacgacgcagggtgcgcaggtggatgacgttctccccctcggtaatccccagtgcgtcagcgacgtggccggacgcggggcgcaatacgctaagcagtttttcgctggtgggatggctgccctgatccagcagattctggctaaaacgcgcctgggcgttgagcgggtaatcgaacgggcgcatcagcaccagcacgccgacgccctgacggcgctgtacccagcctttttccaccagttggtcgatggcgcggcgcagggtgtggcgattcacctcaaagcgcgctgccagttgctgctcggcgggaagatagtcgccgcagcggtagtgttgacgaagctcctgctcaagttttgcggctatctcttgatagcgtgttgggtagctggtcggatgtgtagacaagtgcatagatatcaatgcctcgcttatcagataaagtgcttacgcaaccgttgagagaggaaatccagcaggctgaccgtgacgatgataagcaccatcagggcgcaggtttgttggaactggaaaccgcgaatcgcttcccacagggtgacgccgatcccgcctgcgccgaccatgccgacgacggtcgccgagcggacgttggattcgaagcgatagagggagtaggagatcagcagtggcatcacctgtggcagcacgccgtagaggatctcttcgagcttgttggcaccggtggcgcgaatgccttccaccgggccgggctcaatcgcttccaccgcttcggaaagcagcttggagagcacgccggtggtgtggataaacagcgccagcacgccagcacgccagcgaacgggccgaggccgacggcgaccacgaacagcatggcgaagaccatttcgttaatggcgcggcaggcgtccatcaggcggcgaacgggctggtaaacccaccacggcaccaggttttcggcgctcatcaggccaaaggggatggagagaaccaccgccagcgcggtgccccagacggcgatttgcagcgtgacggccatttcggtgaggtaatcctgccactggctgaaatcgggcgggaagaagtcggcggcgaacgtcgccatgttgccgccgtctttgatcagcgtaagcggggccatttccgcgccctgccacgagacgaccaacacggcgagtacaacggcccagctcagaagcgagaaccagctgcgcttgggtggggcgatggtgatggtttgcatgtttggctccggtctgtaggccggataaggtgcttgcaccgcatccggcatcaacgcctgcacattgtcggatgcgacgccggggcgtcttatccgacctacgatttactgcaccgctttactcacgctactcatcgcgcttagcgcgttgttcaggcggtccaggtcatccagctgcgcctgaatctcggtggtttttgccagcttgtcctgctcattcagtcctttattgcttttcacgccctgcatctctttaaacagcgcgagctggcgaatcggcaccagttgcaggtcgctggaagcgcggaatggcgcccagcccaggcgttccagcaccgctttttcttccggcgttttgccgtagttcataaagaagtcgtagatcttgtctttggtggtttcggaaagattcttgcgccagacgatcggatcgcctgggatcagcgggctcttccagatcaccttcagttctttcagcttctctggcgcggaggttttcagcttgtcgaggttttcggtgttgttggtggcaacatccacctgcttgttggcgacggccagcgcgttggtttcatgcccggcgttgacggtgcgcttgaagtcgctggcggagatattgtttttggcgaagacgtagtagccggggacgaggaagccagaggtggagttaggatcgccattgccaaaggtgagatctttccgcttcgccagcagatcgttcaggttgttgatcggactgtctttgttgacgatcaacacgctccagtaacccgggcttccatccgccgcgaccgtctgggcgaagacctggccattggcgcgatccaccgcttccatcgcgctcagattgccgtaccaggcgatatccactttattgaagcgcatcccctggataatgcccgcgtagtccggggcaaagaaggcgttgaccttcacgcccagcttcttctccatatcctgcaagaacggcgtccattgcggtttcaggttttgctgactttccgtactaataatgccgaaattcaacgccttttcctgctcttcggcgtgcgccgggcttaacagggtgctgaggctgaacatgctggtgaaggccaggctggcaattatcttagcgttcattcgttttcctcaatgatggggatgtcaggcagctttcgcgttctcttcgacgcggttaatgctgcggtagagatggtcaaaacgttcgttatcaaactgttggctgctgccgtcgtagaagacgtgcccctggcgcagggcgacgatgcgttcgcagtagcgcagggcgtaatccacctgatgcagcgtgacgaccacggtgatgccgtcgttctggttgatgtcgcgcagggtgtccatcacgatgcgcgcactttctgggtccaggctggcgatgggttcatcggccagaatcactttcgcctgctgcatcagcgcacgggcaatcgccacacgttgctgctggccgccggagagggtggaaacgcgctgatgggcaaaatgcaccatgccaacgcgggtcagcgcctgtaacgcgcgctgtttctgctcgccggtgaaccagctaaaacaggtgcgccagaacggcgtgctgccgagcgcgccaatcagcacgttctccagtacgctcaggcggttcaccaggttgaattgttggaatatgtagccggtatgggcgcggcttttgcggatatcgcgggccaggcggccttcgcgctggactgtgcggcccagcagctcgatatggctaccgacagatttatcgccggtaatcaaaccgcttaagtgacgtaaaagggtggattttccggaaccgctcggcccaagcagagccaccatttcaccgtgatgaatgttcagatcaaccgcatgcagcgcctgatgctgattgaaggttttggcgagcttctcgacacggataatcgtttgcatgatgcagcctccctaaaaaagtggctccatcgtggcggattattgtgacgatttggttaattaaaagtgactaacagatgaagagttaacgggaattcgatgacagtgcgggagggcgggcctcccggcgggttattgcgttggttgttgtttgacgacattaatcatccacggtacgccaaatttatcggtgactttgccaaagccatgcgcccagaaagtttcctgccaggccatttcgatttttccgttagcggcaagattgtcaaaccagcgttttccttcttcgacctgttggctatcgagcaccagcgtaaagccggagtagctggcttttccactcggcatggcatcgctcatcatgatgtcgcttccggcaatgcgcacattggcgtgggcgatggcggtatcgggaaattgcattccggaagggcagttctcggcgctgtcctgcgcactttttggcatttcgccgaagctgattttatagagcagttccgcgcccaacgtacgttgataataggcaatcgcgtcggaacagttaccggcaaaagagaggtagggacttaacggcatgatggtgacctcagttaagagaagccagttaagtgtagttcgaaatttatacagatgagaggcggcctgataagacgcgcgagcgtcgcatcaggcagtcggcactgttgccggatgcggcgtaaacgccttatccggcctacggagggtgcgggaatttgtaggcctgataagacgcgcaagcgtcgcatcaggcagtcggcaccattgccggatgcggcgtaaacgccttatccggcctacggagggtgcgggaatttgtaggcctgataagacgcgcaagcgtcgcatcaggcagtcggcaccgttgccggatgcggcgtaaacgccttatccggcctacggatggtgcgggaatttgtaggcctgataagacgcgcaagcgtcgcatcaggcagttggcactgttgccggatgcggcgtaaacgccttatccggcctacggagggtgcgggaatttgtaggcctgataagacgcgcaagcgtcgcatcaggcagtcggcaccgttgccggatgcggcgtaaacgccttatccggcctacggagggtgcgggaatttgtaggcctgataagacgcgcaagcgtcgcatcaggcatctggcaccgttgccggatgcggcgcgagcgccttatccggcttaccgatcacaatacaatcagttctttttcacaaactcagatttcagtttcatcggaccaaaaccgtcgattttgcaatcgatgttatggtcgccttcaaccaggcggatgtttttcactttggtgccaattttcagcatgctagagctacctttcaccttcagatctttaatgatggtaacgctgtcgccgtcagccagcagattgccgttagcatctttaacgatcagctcgtcgctttcctgtgcaggttctgcgtcgttccattcgtaggcacattccgggcagatgtacatgccgttatcttcgtaggtgtattcggagttgcattttgggcagtgtggtaaactcatgtggatttcctcaaaagtcagcagggcaaaagcgccaaaaaacggcagattgccgaaaaaggccgcaattatacacaaaatccctgagtttgtcgggggtactgctgattttagacgacgatcgttttcatttgaaaggaaacgcaaaaagaaaataatctttttgcctctatttattatttaagataatgttaatgctctacttgttctttttttaattcacatgatatttttatctttctgacgttttaaacgtatcagaagacgttatttattctgataaaaaacaacacactaaatataaaattatttcttgcagtaattataaaagccgaaaacagaactcaaaaacaatctggctaaataaaataacaaaatttgctttaaggaagaattttctatgtacacacagaccctgtatgagttaagtcaggaggctgaacgcctgttacagctttctcgccaacagttgcagttactggaaaaaatgcctctctctgtacccggagacgacgcgccacaactggctttaccctggagtcagcctaatatcgccgaacgtcacgcgatgctgaataatgagttgcgtaaaatttcccgactggaaatggtgcttgcaattgtcggtaccatgaaagcagggaaaagtaccaccattaatgccattgttggtacggaggttctgcctaatcgtaatcgcccaatgactgcgctgccgacgcttattcgccatacgcccgggcaaaaggaaccggtactgcattttagtcatgtcgcgccaatcgattgtttaattcaacaattacaacagcgcctgcgtgattgcgatattaagcatctgaccgatgtgctggaaatagataaagatatgcgtgcgcttatgcagcggatcgaaaatggcgtcgctttcgaaaaatattatctgggtgcccagcctatttttcattgtctgaaaagtttgaatgatttagtgcgactggcgaaggcgctggacgtcgattttcctttttctgcttacgccgccattgagcatattcccgtgattgaagtggagtttgtccatctagcggggctggagagttatcccggtcagttgacgttactggatacccccgggccaaatgaagccgggcaaccgcatctgcaaaaaatgcttaaccagcagctggcacgcgccagcgcggtactggcggtgctggattatacgcaactgaaaagcatctccgatgaagaggtccgtgaggcgattttggcggtggggcaaagcgtgccgctgtacgtgctggtcaataagttcgatcaacaggatcgtaacagtgacgacgccgaccaggtgcgggcactgatttccgggacgctgatgaaaggctgtattacgccacagcagatatttccggtgagcagcatgtggggctacctggcgaatcgggcgcgctatgagttagccaacaacggtaagttaccaccgccagagcaacaacgctgggtggaagattttgcccatgccgcgcttggcaggcgctggcgtcatgccgatctggcggacctcgaacatattcgtcatgctgccgatcagttgtgggaagatagcctgttcgcccagccaattcaggcgttgcttcatgccgcttacgctaacgccagcttgtatgctctgcgatctgccgcgcataaactgttgaattacgcgcagcaggcgcgggaatacctggattttcgtgcgcacgggttaaacgtcgcttgtgaacaattgcggcaaaatatccaccagatcgaagaaagtttgcagctattgcaactcaatcaggcgcaggtgagcggcgagattaaacatgaaatcgagctggccctgacctccgccaaccactttctgcgtcaacagcaagatgcgctgaaggtgcagttagccgccttgtttcaggatgatagcgagccgttaagcgagattcgtacccgctgtgagacactgttacagacggcgcagaacaccatcagtcgcgactttacgctgcgttttgccgagcttgaatccaccctttgccgggtgttaaccgatgttattcgccccattgagcaacaagtcaaaatggaattgagcgagagtgggtttcgtcctgggtttcattttcctgtttttcacggcgtagttccccacttcaacactcgccagctgttcagtgaagtcattagccgccaggaagcaacggacgagcagagcacgcgtttaggcgttgtgcgtgagacttttagccgctggttgaatcagcccgactggggacggggaaatgagaaaagtccgacagaaacggttgattacagtgtgttgcaacgagcattaagcgcagaagtcgatctctattgccaacaaatggctaaagttctggcagagcaggtcgatgaatctgttacggcaggcatgaatacttttttcgctgagttcgctagttgtttgacggaattacagacgcgtttacgcgaaagtctggctctgcgtcaacaaaatgaaagcgtggtcaggctgatgcagcagcaattgcagcagactgtgatgactcacggctggatttacaccgacgcccagctgttacgcgatgatattcaaacacttttcacggcagaacgatattgaccaagacgttacttgacggccccggtcgcgtgctggagagcgtttatccccgctttttagtggatctggcgcagggtgatgatgcccgccttccacaagcccatcagcagcagtttcgtgaacgactgatgcaggaacttcttagccgtgtgcagcttcagacatggacgaacggcggcatgttaaatgcgccgcttagcctgcgtctgacattggtggaaaaactggcgagcatgctggatcccggtcatctggcactgacgcagatcgcgcagcatctggcgctgctgcaaaaaatggatcaccgccagcactctgctttcccggagctcccccagcaaattgccgccttgtatgagtggtttagtgcccgttgtcgctggaaggaaaaggcgttaacgcaacgaggcctactggtgcaggcaggtgatcagagcgagcaaatttttacccgctggcgtgctggggcgtataacgcctggagcttgcctgggcgctgttttatcgttctggaggagttgcgctggggggcatttggcgatgcctgccgtctgggaagcccgcaagcggtggcgttgttgctgggtgatttgctcgagaaagcgacacaacatctggcagagagtatcaatgcggcaccgaccacgcgtcactattaccatcagtggtttgcctctagcaccgttccgacgggcggggagcatgctgattttttaagttggctgggaaagtggaccacggcagataaacaacccgtttgctggagtgtgacccaacgctggcaaactgtcgcgctggggatgccacgactctgtagtgcgcagcgtctggcgggggcaatgctcgaggaaatcttctctgtaaatttggcgtaaataatcagttacatcaatgagtcctaaacgaaatccatgtgtgaagttgatcacaaatttaaacactggtagggtaaaaaggtcattaactgcccaattcaggcgtcaactggtttgattgtacattccttaaccggagggtgtaagcaaacccgctacgcttgttacagagattgcatcctgcaattcccgctccccttttgcggccgtcgcgctgatttttctggcgtttgcggaaatgggccaactctgcgaggaaagctatgctgaaaaggaaaaaagtaaaaccgattacccttcgtgatgtcaccattattgatgacggtaaactgcgtaaagccattaccgcagcaagtctgggtaatgcaatggaatggttcgattttggtgtttatggttttgttgcttacgcattaggtaaagtttttttcccgggggctgaccccagcgtgcagatggttgctgcacttgccactttctccgttccctttctgattcgaccgcttggcggactcttctttggtatgttgggcgataaatatggtcgccagaagatcctcgctatcactattgtgattatgagcatcagtacgttctgtattggcttaataccgtcctacgacacgattggtatttgggcaccgattctgctgttgatctgtaagatggcacaaggtttcagcgtcggcggtgaatataccggggcgagcatatttgttgcggaatactcccctgaccgtaaacgtggctttatgggcagctggctggacttcggttctattgccgggtttgtgctgggtgcgggcgtggtggtgttaattagcaccattgtcggcgaagcgaacttcctcgattggggctggcgtattccgttctttatcgctctgccgttagggattatcgggctttacctgcgccatgcgctggaagagactccggcgttccagcagcatgtcgataaactggaacagggcgaccgtgaaggtttgcaggatggcccgaaagtcagctttaaagagattgccactaaatactggcgcagcctgttgacatgtattggtctggtaattgccaccaacgtgacttactacatgttgctgacctatatgccgagttatttgagccataacctgcattactccgaagaccacggggtgctgattattatcgccattatgatcggtatgctgtttgtccagccggtgatgggcttgctgagtgaccgttttggccgtcgtccgtttgtgctacttggtagtgttgccctgtttgtgttggcgatcccggcgtttattctgattaacagtaacgtcatcggcctgatttttgccgggttactgatgctggcggtgatccttaactgctttacgggcgttatggcttctaccttgccagcgatgttcccgacgcatatccgttacagcgcgctggcggcggcatttaatattagcgtgctggttgccggtctgacgccaacgctggcggcctggctggtcgaaagcagccagaatctgatgatgcctgcctattacctgatggtagtggcggtggttggtttaatcaccggcgtaaccatgaaagagacggcaaatcgtccgttgaaaggtgcgacaccggcggcgagtgatatacaggaagcgaaggaaattctcgtcgagcattacgataatatcgagcagaaaatcgatgatattgaccacgagattgccgatttgcaggcgaaacgtacccgcctggtgcagcaacatccgcgaattgatgaataagctgaaacggatggcctgatgtgacgctgtcttatcaggccaattgaactcttaaggttcacttaatctctgacgcgcatactctcctccaggttaacggaggagagtgcaatgaaaaaccgtgtttatgaaagtttaactaccgtgttcagcgtgctggtggtcagcagctttctttatatctggtttgccacgtactgatctttcttcagccgtacccaggcccgcgtgccggaagtctcttgccggttttgcaggaaaaactgcccgtgatgcaactgtgtaatgcggctgacaatacttaaccccagaccaatcccgccataacggctgtccatacgtacaaacgctttactcaactccccgcatttactctcatcaatacctggtccttcatcttcaactgccatgaccgctccgtcatcttcttgcagcttaatcataatgttgctgccttgcgggctgtaacgatgggcgttttctaccaggtttcgcaataacatccgcagcagggttgcatcaccctgaacggtgatgtcggcggcgctctctggcaatagcagggtttgctgtcgctggtcgagcatggtactgagttcgtcatagctggggagaatgacatcttccagcagttttacatgttgataattaccggaagaaaaactctgtccggcacgcgccagttgcagcagctgggagacgctctccatcatctgatcaagccgtgccactaacggtgctacatcaatgtgatgcgttttcgccagcagttccagatgcaaacgcacccccgccagtggcgttcgcagttcgtgcgcgacgtcagcggtaaacaacctttcgttatccagcgtgctggtcaggcgactgaccagatcgtttaacgcgctaaccaccgcttcgatttcgagggtggcgctgtgaatggcaatgggcgttaagttgtcggcggtgcgcgcttccagctctttttgcagctccgccagcgggcgggtgatgcggcgtaccgcctgatagcagataaatagcgtcaggctgaccataaagacgccggggacaatcaggctggcgaccgcctcgcggatctcacgcatgatgtggcgatcgttgttgcgattgtcgcgtagcgcctgctcaaacagctgaatctgctcggtactttcatgccatagccagaagacgctgatcagctcaaacaccaacaaaatggccccgatggtcaatatcagccgttggcgcaggcttattggtcggcgcagaaaatgcatcagattcaattagttttcctcattcgcgaccagcatatagccaaagccgcgcacggtgcggatacgggctttgcccactttgtcgcgcagattgtggatatgcacttccagggtgttggtgctgggttcattgtcccagttatagatgtcgttgtagagaatttcccgatgcaccggactgcctgctttgagcattaaccgactcagcagagcatattctttgggcgtcagaatcaactcttcaccgcccatccatacctgacggcgacccatgttcagcgtcagattgccaacaatcagctcactttcgccctgattattatggcgtcgtagcagggcgcggatacgggcatgtaactcttccagcgcaaaaggcttcaccagatagtcgtcggcaccgacatccagcccggcgattttgtcggtcagcgtatcgcgagcggtgaggatcagtaccggcagggtatattttttctgccggatacgggcgagaaaatgcagtccatcttcgtcgggtaaccctaaatccagtaccaccaggctgtaatgacctgcctcaaggctttgttccgccatccgcgcggttgtcacgctatcgcacgcgtagccttcggtttgcgccgccagaatcagtccctgcaataacagcgtatcgtcttcaacaatcagaattttcattcactcactctcctgcaagtttgcagaatatcatccgcagcctggtaatacttcgtctcaacgccagttaatcccaatagcgtggagaataaattgtcttgactatagtgttgcgtttgcgcctgtttttgcaggcagttctggtcaacctgataccgtttttgataatcctcgctcagccacagcagcatcggcacctgtttttggctatccggggcgatggcataaggcagaccgtgcagatagatgccattttcacctaagctttcaccgtggtcagaaagataaaccaggctggtggtaaatttatcctgatgttctttcagcagattaatcgctttatcaacaatatagtcgacgtaaaccagcgtgttgtcgtaagtgttcaccagttgctctttggtacaggtctggatctcattggtgtcgcaggttggggtaaatttcctgaactgaggcggatagcggttgtaataggtcggaccgtggctgccgatggtgtgtaagacaatcacgccatcaccttgcaggttattgatgtactcttcaagcccgtggaacagcacttcgtcatagcattcgccgttgatgcactgatcaggtagattcagcgcggtgacgttctggtgaggcacgcggtcgcaggcacctttacagccgccatcgttgtcattccacagcacgttgatgcccgctcgctgaatgatatccagcacgccttcctggtgctgtgccagctcttctttgtagtgctcacgcggcatatcgctgaacatgcacggtacactaactgccgttgccgtgccgcaagatgcggtattagggaaatagaccacgttatctttcgccagccgcgggttagtttcacgcgggtagccgttgagggagaagttctccgcccggctggtttcgccgacaatcaggatggtcaaatttttacgtttttcgttctgcattaacgggttgcggtgcgcgtcttcaccaattcgcaccagcggcagatttgccagtcgctgatgggagtaccaactccagctggcaacaatgctgttagaggggcttaaggatttcaccagctctttgttattgcggaacaagctggcgtagtctttataaaacagtgcggcgaccagcaaaatcagtagtacagaaaccagaatattggctccacggaaaagaacactgcgcagacggctggtggcaggtttgatttttatccagcaggcaatcagcgcagcaagcacgccgctgaatcccagcgttaataacatttgcggtgtcatcagcgcataactttctgccggagtggtatcaataatattggcaatcatgctgcggtcgatgacgatgccgtaagtcattatgaaatattgtgcagccgcgccaaccagaataaacaggcaggccagtggtcgattaagccataagaaagagcttagtgtcaggacaatattaatcacgctgaaagcgacgaccggcatgctcaagaaaaccagtacgttatgcaggctatccagcggcagcgcctgcaacacctgtttaaaaaaggcaatattcaggcagatagagatataaaaagcggccaacaatagccaggcgagtaaattcaaagagggtctttttagtaggcgcttcaacatcacggtgtttccatcgaacaaagtgcgcatatgctcgcaaagcaaaattaagccaaccttaagttcttaaggttggcttttatgtttgctggattaaggggaattaatctttgcttattggtgcatctaagggatacgggtttttatgtagccggttgtaattcagcgcatacatggcggtgatgaccatcagggtgacaaaactccacataacctctttcgctccggaccccaccacggcccagatgcagtagaggaaggcaatggtagtaactgccagatatgccgggcgtgctttaccaaagtgaccgtgtccgagcagcagtaacgccgcacaggtgtaaagatatggcaccagtgtaaagatgacgctgacggaagaaaccagaccgaactctttggtcgcgtttggactaatgctgctgagctggaagatggtcatcaaaataccgacgataatcagccccgccactggcgtacccgctttatttacacgggcaaaaatcggtgggaacagtccgtcatcggcagcggctttcgccgtttgacccgccagcaacgtccagccgcccagactacctaagcaacccgcagctgcgcagaaggaaacaatggccccggcggtgtcacccaacgccatccgtgcggcatcaccgaatgggctagcagaaacgcgcagtgcggcattagggatcatccccataatcgcggtggtagaaagtacatagcaaacggcggcaatcaataccccaccaatggtggcgatagggacattgcgtttcgggtttttcaccacacctgcggcaacggaggcactttccacaccgatgaagctccacagcgtaacgttaagggtactttgaattgcaccgaaggtgcccaggccgctgacgttccatgccgccatataggtttcaccacggaaccagaaccagccaaatacggcaatcccgacgatggggatcagcgccagcacggtggcaactgcctgcacacgggtgatcattttcggaccgacaatgttcagcaggacgaagatccacagcaccacgacgcaggtgatggttaataccaatggatctttcagaatcgggaagaagtaacttaaatatcctacgccaatgaccaccatggcgatattgccgatccagcaggccagccagtagaggacgttggtttgataaccgagaaacgggccaaagcagcggcgggcgtaagcgtaagaaccaccaggacttgggtcgaggaagctcattttggcgtataccatgctgagccccagtgcaccgataatcgtcaccaaccatccataaatggcaatcccgccagtagaggccaggtttgcaggtaacagaaaaacaccactccccataatattcccgctcaccatcagggtgacggggattaagcccactttgtgagcatcagcatcgctagacataattaaactcctgcgaaggcgagcttcgtgacaataaattacgtcatatcatacgcctgcattcgatagttgaattattatcgaccgggttatcgctgatgccgttattaatatagctcttcgttaaggttaaaaatcaggcgacagtgcgttctctgtgctgactaacataatgcagcggcgtcataccgtagaagtctttaaagacagaaataaagtagctcgtactgttgtagccgcaggactgacttacctgagagatatttttaccgtccatcattaattcatttacggcataacgcatgcggcaggtggtgattatttggctataactggtgttttcgcttttcaactttttctttaacagacttgggctaagacataaacaactggctaccatactaagattccagtctttgtgaatatcgctttcaataatttgataaacgctgtcacttacacaattacgtaacatatacatcattaaactaacgaattttttactgtcgagaaaacgggatagcaccgtgaataataatgcgcgtgttcgttccttttcactctcagtttctgcgggcatcatgctgtgttgcgcggcaacgcgaaagacgtctggcgtcaggcatggcagggtgagtatgggcgtagcgctacgttgccatactggtatttggctgagatctttattcagaaaccggaggtaatctttgatgatgtcgtgactaatatgagcaaccaaagtgttgttaagagaggagacgtcgataatattattttcacaatttaataacgccatatggttagctttaaggctaataggttctttcccattcacccttatccagacatctttttcagtcaataaaacaatacaaggttggtcgctgcaaatcctcatacatgtactcctgagtgcgaataaaagaccagttctcgctaaagcaaagcgataccgggaaatggttatataattgtatgatgaatataaacatgcataaaaataacgagttttactaatagtacaaatttttatagtaatttctcatgtacatatttttttacaggataaataacaggcaaaaaaaagcgcggggtggggccgcgcaaaaagtatgacatttttgtttgcagcaatttttatgaaaacgttgccatactcaaaaggcctaaggccaggcggcgtaatgttatttaaacaattacgccttcagcggaatagtggttacgctttcacgcacataacgtggtaaataccgtcaataatttcagtcccttcagtttcgtgttcaaatccagggaaatggtggtcccaggattgcaggctgcgtaaataacttacttgcggactgtttttatcgccgaagttttcaccagacagcagcatcgggattcctggcggatacgggataacactgtttgccgcgatgcgtcctggcagattttcaatggataccagttcgacattgttgtcgacaatcgcgttgtacgcttcacgcggggtgacttccgccaccggcaggccggaataggcttcgttcaaccgtgcgccagggttgttttctttcagccaggcaaacatggtgtcacccagatcgtgaatccccatgttcgcgtaagtgtcaggatattgttcaacaagttccggcatcacctgcgccagcggtgtgttggcgtcatagtggcgtttgaaggagcaaagggtgttaaccagagttccccatttcccacgggttacgcccatagagaacaggaacataatttggaagtcagtggtgcgggtaggtacaatgccgtggcgaccaagccaggcagtgaccagcgccgccggaacaccggtttcttccagttcaccatcttcacccattcccggagcaaggatgctgactttaatcgggtcgagcatactccagttatccggaatatctttgaagccgtgccagctttcgcccggatgcattacccagcagtcctgaacggtggtcagcagtttggttggtgcgtcagcaaagtcataggttttgccggtttgtgggtcggtgacgacttctttgttccacggtttgaagaaccagctaccgtcagcggtgaactctttatatagccgcgccatcgcctgacggaaatcaaccgcttcgtcaatcacttcctgtgtcagactcaggccgctgttgccgtccatcatgctcaccgccacgtcgttggatgcgcagatggcatacagcggggaggtggtggcatgcatcatgtaggcctggttgaagcgggagaagttaatcgccccacgaccttcacgtacatgaatataagaagcctgactcagcgcattcagcagtttgtgggtggagtgggtggcgaaaacggtaggaccgttgtgatcgccaggttcgccgcgcatggcatagtgatcggcatagatcgggttgaaacgtgcatagccgtaccaggcttcgtcaaagtgcagacgatcggaggttttttccagcagatcctgcgcttctttagcgttataacacacgccgtcataggtgcagttggtcaccacgcagtaagacggtttttgcccggctttgtctttggtcagcgggctttcactgattttcttctgcaaggtttcaggttgcatttcctgcggatagattggcccgataatgccgtagcggttgcggcttggcaccatatagaccggtttcgcgcctgtcagcatcaaaccttgttcgatggatttatggcagttacggtcaacgaccacgacatcgttatcggtcatgcaagcctgcatgatggtgcggttagagccggaagtaccgacgactacgctccaggagcgatcggcaccaaatacgcgtgcggcatatttttcgctttcgccaaatgcgccagtatggtcaagcaaagaaccgagggaagttcgttcgatgcccatgtcggtgcggaacagattttcaccatagtagtcatggtagaaacgtccggcgggtgttttggtaaaaccaacgccgccctggtggcctggcgctgcccaggaatattcatggatgtcactatatttcatcagcgcgctgaacagtggcggcaacagctgctggcggtagcgggtcatcgcggcaacggcgcgtccggcgataaagtcggcggtatcttccagaatccaggcgaattcatcgacaagctccagcaggtcgcgatccattgcggcgagggctttttcccgatcgcccaacaggaagaccggcacgttttgttggcgctcatgaagcttaccgatcaattgtctgacgttttgatgttcgtccggatgttccatttgatagctgaacatcaggcagtcaatggcttcgttactagagagaatggcaaaaccatcatcaaaggaggtggatttaatcacggtaacattttgctggcttaaagcatctgccagacgctcaacggcgttaccgacccaggtgtcttgatggagaaactcgctttcaacaattaatactttcatcattgcttacccggttatgaaggaatcttcgttgcgggcaagtatcttccggccttttcgggctgtaaagcgcgtgaaaaacaaacatttttgaaatatttagttttataaacaatacgttatgtgattattttaaattattttcactgcttattatcgacggctaaactatttttttggctgatactgatatcgtctttagccgggaaacgtctggcggcgctgttggctaagtttgcggtattgttgcgggctcatgccgacatatttgccgaacgtgctgtaaaaacgactactactacgaaagcctgccgtcagggcaatatcgagaatacttttatcggtatcgctcagtaacgcgcgaacgtggttgatgcgcatcgcggtaatgtactgtttcatcgtcaattgcatgacccgctggaatatccccattgcatagttggcgttaagtttgacgtgctcagccacatcgttgatggtcagcgcctgatcatagttttcggcaataaagcccagcatctggctaacataaaattgcgcatggcggctgacgctgtttttgtgtgtgcggctggttttattgaccagaatcggttcccagccagagaggctaaatcgcttgagcatcaggccaatttcatcaatggcgagctggcgaatttgctcgttcggactgtttaattcctgctgccagcggcgcacttcaaacgggctaagttgctgtgtggccagacttttgatcaccatgccgtgagtgacgtggttaatcaggtctttatccagcggccaggagagaaacagatgcatcggcagattaaaaatcgccatgctctgacaggttccggtatctgttagttggtgcggtgtacaggcccagaacagcgtgatatgaccctgattgatattcactttttcattgttgatcaggtattccacatcgccatcgaaaggcacattcacttcgacctgaccatgccagtggctggtgggcatgatatgcggtgcgcgaaactcaatctccatccgctggtattcgctatacaggctcagcgggctgcgggtctgtttttcgtcgctgctgcacataaacgtatctgtattcatggatggctctctttcctggaatatcagaattatggcaggagtgagggaggatgactgcgagtgggagcacggttttcaccctcttcccagaggggcgaggggactctccgagtatcatgaggccgaaaactctgcttttcaggtaatttattcccataaactcagatttactgctgcttcacgcaggatctgagtttatgggaatgctcaacctggaagccggaggttttctgcagattcgcctgccatgatgaagttattcaagcaagccaggagatctgcatgatgtctgcacccaaaattacatttatcggcgctggtagcacgattttcgttaaaaatattcttggtgatgtgttccatcgcgaggcgctgaaaacggcgcatattgccctgatggacattgaccccacccgcctggaagagagccatattgtggtgcgtaagctgatggatagtgcaggggccagcggcaaaatcacctgccacacccaacagaaagaagccttagaggatgccgattttgtcgtggtggcatttcagattggcggttatgaaccttgcacggtgactgatttcgaggtctgtaagcggcatggtctggaacaaaccattgccgatacgttggggccgggcggtattatgcgcgcgctacgtaccattccgcatctgtggcaaatttgcgaggacatgacggaagtctgccccgatgccaccatgctcaactatgttaacccaatggcgatgaatacctgggcgatgtatgcccgctatccgcatatcaaacaggtcgggctgtgccatagcgtgcagggaacggcggaagagttggcgcgtgacctcaatatcgacccagctacgctgcgttaccgttgcgcaggtatcaaccatatggcgttttacctggagctggagcgcaaaaccgccgacggcagttatgtgaatctctacccggaactgctggcggcttatgaagcagggcaggcaccgaagccgaatattcatggcaatactcgctgccagaatattgtgcgctacgaaatgttcaaaaagctgggctatttcgtcacggaaagcagtgaacattttgctgagtacacaccgtggtttattaagccaggtcgtgaggatttgattgagcgttataaagtaccgctggatgagtacccgaaacgctgcgtcgagcagctggcgaactggcataaagagctggaggagtataaaaaagcctcccggattgatattaaaccgagtcgggaatatgccagcacaatcatgaacgctatctggactggcgagccgagtgtgatttacggcaacgtccgtaacgatggtttgattgataacctgccacaaggatgttgcgtggaagtagcctgtctggttgatgctaatggcattcagccgaccaaagtcggtacgctacctagccatctggccgccctgatgcaaaccaacatcaacgtacagacgctgctgaccgaagctattcttacggaaaatcgcgaccgtgtttaccacgccgcgatgatggacccgcatactgccgccgtgctgggcattgacgaaatatatgctcttgttgacgacctgattgccgcccacggcgactggctgccaggctggttgcaccgttaaaacgcgactaaacgctactgcgccgggggatttattccggcgcacacctctgacgataccaataacagaaggcgggcgttggtaacagcgacccgataccctatgagcatttcaatgactacaaaactcagttatggatttggagcgttcgggaaggattttgcgatcggcattgtgtatatgtacctcatgtattactacaccgatgtcgtcgggctgtctgtgggtttggtcggtactttgtttctggtggcgaggatctgggatgctattaacgatccgattatgggatggattgtaaatgctacgcgaagccgatggggtaagttcaaaccctggatcctgatcggtacgttggcaaactctgtaatcttatttctcctctttagtgcgcatctgtttgaaggtactactcagattgtctttgtttgcgtgacctacatcctctggggcatgacttacaccattatggatattcccttctggagcctggttccaaccatcacgctcgataaacgtgagcgcgaacaactggttccttatccgcgtttttttgccagtctggcaggctttgttacggcaggtgtgacgctaccatttgttaattatgtcggcggtggcgatcggggatttggctttcagatgttcactctggtactgatcgccttttttattgttagtaccatcatcactctgcgcaatgtgcatgaagtctttagcagtgacaatcaaccgtctgctgaaggaagccatctgacacttaaagccatcgttgcgctaatttataaaaacgatcagcttagttgcctcttgggtatggctcttgcttataatgtagccagcaacattattaccggctttgctatctattatttcagttatgttatcggtgatgcggatttgttcccctattatctgagctatgcgggagctgctaacctggtgacgttagtattcttcccacgcttagttaaaagtttatcccgacgcattttatgggccggagcatctattcttccggtgttaagctgtggtgttctcctgttaatggcattaatgagctatcacaacgtcgtcctcattgtgattgcgggtattttgctgaatgtgggaacggcgcttttctgggtattacaggtcatcatggtggcagatatcgttgattacggtgaatataaactgcacgtacgctgtgaaagtatcgcttactccgtgcagactatggtggtgaagggcggtagtgcctttgcggcttttttcattgcggttgtgttagggatgattggctatgtaccgaatgttgaacagtctacgcaagccctattaggtatgcagtttattatgattgctctaccaactctgtttttcatggtaacgctgattctctacttccgtttctatcgcctcaatggtgacacgctgcgcaggatccagatccatctgctggataaatatcgcaaagtaccgcccgagcctgttcatgctgatattccggtcggtgcagtgagtgatgtgaaagcctgacgtggacaatagctaacgaaaatggcctgatgcgatatgtttatcaggccacgtcttaatgtaatgctttggatttgcaaattttgtagaccggataaggaattcacgccgcatccggcatcaacaaagcgcaagttgttatccggttatcaagccaaagcgccgtagctggcggcaatgaaagcgagcgaggaatatcaccgtcgttaatgcgccaagcagcgcgcagaacatatcggattgcgtgtcccactggtcgccctgggtgccgagaaaatcatccgctccctgacccattgccagcgctgcccaccactcgattaattcatacatcgcgcttatcgccagcgccacgcagcagaccaggaacgccaccattttacgtccgcgcacgtacatcccgcgaacgagaatttctcgtgccaccagtgcaggcaccagcccctggaaaaagtgccccagcttgtcatacggattacgactcaaccccagccattcctgcacctcaaaaccaacggggactttcgcgtaggtgtattgtccgccgaccatcaggatgatggcgtgaaggaaaatgagcgtatagagcagcggcgttaacggataacgtctggcggtggcaagcagtagctgcacgacaataatcaccggtgtcacttccatcagccaggtgagtttgtcatgggcgctaatgccggtataaatcaggattaacgttagcgtcagtgcgctggtgttaagaattaacggcttgagtgtgcgggtcatggtgagttcgcaaatcagggaaaatactgactattcaccagcaagcgtgaaattacaatcgcaaaagaggtggccagggggatcacctggcagcatgctgccaggcgctgggccgaagaggttacttagtgcagttcgcgcactgtttgttgacgatttgctggaagaagtcgttacctttgtcatcgaccaggataaacgccgggaaatcttctacttcgattttccagatagcttccatacccagctccggataagcgacgcactccagatgcttgatgctctgctgcgccagtaccgccgccggaccgccgatgctaccgaggtagaagccgccgtgtttatgacacgcgtcggtaacctgctgactgcggttacctttcgccagcatgatcatgctgccgccgtgggattgcagcagatccacgtaggagtccatacggcctgcggtggttgggccaagactaccacttggataaccggcaggggttttcgccggacccgcgtagtagatcgggtgatctttgatgtactgcggaagttctttaccggcgtcaatcagctctttcagcttggcgtgtgcaatatctcggcccacgataatggtgccggtgaggctcaaacgagtggataccgggtattggctaagctgggcgaggatctctttcatcgggcggttaaggtcaactttcaccgcttcgccttcaccggcctggcgcagttcttgtggaatgtactggcctgggttgtgttccagtttttcgatccagataccttcgcggttgattttcgctttaatgttacggtcagcggagcaggagacgcccatgccgaccgggcaggatgcgccgtgacgtggcagacggataacgcgaatgtcgtgcgcgaagtatttaccgccaaactgcgcgccaagaccgagtttctgggcctcttccagcagttcctgttccagctggacatcgcggaacgcctgaccatgttcgttcccttccgtcggcagttcatcgtaatagtgagcgcttgctaacttgacggttttcaggttggtttccgcagacgtaccgccaatcacaaacgcgatatggtacggcgggcaggctgcagtaccgagggtacgcattttctcgacgaggaagtttttcagtttgccgggagtcagcagggctttggtttcctggtagagatacgttttgttggcagagccgccgcctttcgcaacgcaaaggaatttgtactcatcgccatctaccgcgtacaggtcgatttgcgcaggcaggttagtgccggtgttgacctctttgtacatgtccagcgccgcattctgactatagcgcaggttatcttcgatataggtgttatagacgcctttgctcagcgtttcttcatcaccgccgccggtccacacgcgctggccttttttaccgacgatgatcgcggtgccggtatcctggcaggtcggcagcacgcctttggcggcgatttcggagtttcttaagaattgcagcgccacgtacttgtcgttttcgctggcttctggatcgtgaagaatagccgcaacctgtttctggtgtgccgggcggagcataaaagaagcgtcgtgaaaggcttgctgcgccagcagggtcagggcttctggttccactttcaggatggtttcgccgtcgaagtcggcaacgctaacgtaatcggaagtgagtagatagtattcggtattgtctttccccatcgggaaaggtgcctggtagataaagggtttgttactcatagcttccagcctgtaactctgtatttgttattcgaaaatggcgtgccgcgtagtcacgggcggcacgcaaagtgcatttataagaacccgtacatcgcggcgaagatccagccgaagacgcagcttacgctcacaccaatcaaccccggcagaataaagctgtggttgatgacgaagcgaccgatgtgggtggtgccggaacggtcaaactgaatcgctgccagatcgctcggataagtcggcaggatgtaataaccgtagcaagccggtgcactagccacgatgtatgccggatcaacgccgatcgccagcgcgaccggaacaatcgccgccagcgccgcagcctgagagtttacaaacttggaaaccagcagcagaacaatggcataggcccacggatactctttcaccatttcacccagtacgccctgaatttcagacatatgcgcaccgaacatggtttctgccatccatgcgataccgtacaccgccacgatggcgatcataccggaacggaagacttcgtttttactgatagacgcgggattggttttggtcaggataataatcagcgccccggtcagcagcataaacatctgaataaccagtaccatgctcagcggtttgccgccgaaggatggacgcaggtcgctatcagcaccaagaagggcgactacagcgattgccccgaggaaaatccacattgccagccagttgcttttcggcagttttttatccagcagcgtcgcggtatcaccgtaaacatactcacggttttccggtacggagatgaatttctggaactcttcgtctttatccagatctttaccgcggaaccagctgaagataccgatcgccaggataccgattaacgtgcttggaatggtgattgccagcagatcgaggaactcaagatggcgaccatcaaaggtgacattacccagcatcgcaaccagagacacgaccgcaacgctcaccggactggcgataatccccatctgtgcaccgatagaacttgccgccatcggacgttccggacggatgttgttcttaatggcgacgtcgtagatgatcggcagaatggtgtaaaccacatgacccgtaccgcaaagaatggtcagtgtacaggtcacaaacggcgcgacaatactgacatatttcgggttgcggcgcagcagcttctcggcaatttgcagcatgacatcaagaccgccgctagcttgcaaggtcgcgcttgccgccaccaccgcaatgataaccagcatgacatcaactggtggtttacctggctgaaggtggaagacgaagaccagaatgaccagaccgataccgcctaataaacccagcgcgataccaccctttctggcaccataaaacagacatatcagtattatgataagttggatagtaaataacatgtgtgaaccctcgcgataatcctatttaaatttttgctgaatagatcacagtcacgttctgttttgtatgaactgttttcagagcctgactaaatatccgtttggtcgttaccggctttagcaaatacctcacagtgaatattggctgattaaagcagcggcaaatttatgcactgtgataagcggctttttcagagagaaagactctctggcgatgggtttatagtttgtactgcgcagatgttaatgttttgtttgctgttatcttattgatatttatcggtctattttttgttctcagggcagatgtcattaggtttatagattaatctgatctacccatttgtgggtaaaaatacacataatgcgggtgacataatagttaattaacttttgttagcgttttgaaattaaaaacaccgttcacctgaagagatattaatttttagcgatgatggagggataattatatttgatctggcacaagttttactgatgaaggatgtaacttgtgccaggggtattttgcattacggtaataattattacttacagataaccagcgatccgttattggcaatattgtttcagtagactgtagtgttctgcctgaatacggtaacggtaaactggacgccccgtgacgccataatggatactggtgaacaagatgtggcagttgaccagccagatgaggtatttacggcaggaaacacggctaatgttaacctcgttggctagctcgtcggtactaaattcatagtcctgatgcgcgtcaatccactggcacagtgtgcgtaacgtctgcggcgttaagccttttggcaagcgacgaggatcctgttcgttggagctgctgccgtggattagctgatcaagctcggcctggtcataatactgatgtttttccagcgccattttcttttgccgccagccggtgagcgcctcttcaaagcgggaagcctggaagggtttgatcaggtaatccacgacaccgtaatgcaggctatctttaatggttgccgcatcggctgcggaggagatgacaatcacatcacttttgcaacgcgcgttatgcaggacaggcagtaaatcgagcccgttctctttttgcatatagatatcgagcaatatcaggtcgataggcgtatcgctattgaagataatctctttggctttctccagcgtgctggctgttccacagcattgaaagcctgggatttgtgctacgtatcggcgattcagctccgcgaccattgcgtcgtcatcgataattaatacattgatcatctgttgctcctctccccgtcccagggtatctggacaaaaaattgtgtgaaaatcccgggttcgctttccacggcgatgctgccgccgagattttctacctgttgtttgacaagtgctaaaccgacgcctcgctcgcttccttttgtgctgacacctttgtcaaaaatgtgatcgattttatcgggtgcgatccccggtccatcatcattaacttcacagtgcagccagccgtgacggtagtgcaatgttacgctaatttcgcctccgggttccggccctaatgcctccagcgcgttttctatcagatttcccaacgtggtaatcagcgtcgcgacctggtcctcactgccgctgtctggcagctggctttcactgtttaaaatcagcgtatggcctaaatcggtcgcgcggttaatcttgctgattaaaaaaccagcgataaccggagatttgatcttacccagcagagagccaatctcttcctgatagttattggctgttttgagaatgtaatcttccaactgcttataactcttcagatgcaataatccgagaatcacatgcaatttattcataaattcgtgggatcgttcacgaagtgcgtcagcatagttgaccagaccgtcgagtcgctgcatcagtttacgtacttcagttttgtccctgaaggtactaatggcaccgatgataacgccattactgcgcaccggaacggtgttgatcagtaatagccggtctttaatcgtaatctcttcgtcgcggcgcggggtaccgtcgcgtaacacttcgctgacatctaccacctgactccaactgtggcttagcgtgctcagtttctcatcgtcctggctcttacggtaattcagcaattcttgtgcggcatcgttgatcagcgtgacctcgccgcgatcgtccacggcaacgacgccttctttgatagactgcaacatggcctggcgttgctcaaacagcgtggagatttcgtagggttccaggccgaaaaggatttttttcagtaccttaaccagaatgcaggtgccaatcagtccgaccagcatgccaaataatacgctccagataatgctccagcgactgtcattgatctgttgggtcacacggcttaactcaaggccgatcgccaccacgccaatttgtttatgattttcatcgtagatgggggtaaatacgcgtaaagcctgcgccagaaaaccgcgattgatagcgacattttcttcgccattcagcgctttaaggatgtcatcacctttaaatggctgaccaatacgctgggcttcaggatggctgtagcgaagactttgcatatcggtaacgacaataaacagcagatcgttgcgtttgcgtacggcttccgcgatggcctggatgccactctcctgcggttttttctgcaagccctgacggatttccgggctgtcggcgagggtacgcgccactgccagtgccttgttggctagcccatctcgcgtcatatcactgatttggctgaagtaaatcagatgcaccaccaatagcacgctgaacagtaccgcactgaccattaagatcactgtggtactcaatttcatcggacgtttgcgtaacatgcggtagggcaaactatgtctcatcagcttccttgtgtgacaaatttcttaagcattatctctgatgaggcgggtaattcaaagggagtaagaatgattggctatataggggaagagactctggcaacggaaactgccagtgctgtatgaagattccggggctatgcttatagcgataatcatactgatgagagagggaaggtcatggatcaggcgctactggacgggggttatcgctgttataccggcgaaaagatcgatgtctatttcaacactgcgatatgtcagcattctggcaattgcgtacgtggcaacggcaagttatttaatctcaaacgaaagccgtggatcatgccggatgaagtcgacgtcgccactgtggttaaagtgattgatacgtgcccgagcggcgcgctgaaataccgtcataaataagcgagggtaaaatggaaatacgcgaaggccacaataaattttacattaatgacaaacaaggcaagcaaatcgctgaaattgtctttgtgccgaccggagagaatttagcgattatcgaacataccgatgtcgatgaaagcctgaaagggcaagggattggtaaacagctggttgcgaaagtcgtggaaaaaatgcgtcgggaaaaacgaaaaattatcccattatgcccatttgcgaaacatgaatttgataaaacgcgggagtatgatgatattcgcagttgatgggagagtacagagtcacgatatttttcattctctccgcgatgtgatgcaggagagcatctgaagggtagggggatgcacaaagaatgggcagagagcgcgtttttttgtcccaagtcatcccctttactgagcaaaaaaaagaatatctcctatatgagaatcatcaatcggggttaataagttttgcgtccccagagcgtttaatattgataggagtcatattatggaaggtaaaaacaagttcaatacttatgttgtttcttttgattatccaagttcttattccagtgtgttcttaagattaagaagtttgatgtatgatatgaatttctcctctatcgtggctgatgaatatgggataccacgacaattgaatgaaaactccttcgcaataacgacaagcttagccgcaagtgaaatcgaagatttaatcaggctcaaatgcttagacttaccggatattgattttgacctcaacattatgacagttgatgactatttccgtcagttttacaagtaaccaggaaggataagaagaacataaaaaatggcactattctctaaaatattaattttttatgtgattggtgtgaacatatcctttgtcattatctggtttatcagtcatgagaaaacacatattcgtttacttagtgcattcctggtcggaataacctggccaatgagtctgcctgtggcattacttttttctctcttttaagagctgtagttgagtggacccgctggttatcgtgaaacgaagcgtctctcctcaaaactggatttgcggaacgatgaacgaagcagtcgcctgactgcttcgttcattaaagtgaaatttatttctgtgggcgcatcgccgggaagagaataacgtcgcgaatagtatggctgttagtaaacagcataatcattcggtcgataccaatacccagaccagcggttggcggcagaccatattccagcgcagtcacgtaatcttcgtcatagaacatggcttcgtcgtcacctgcagctttagcattaacctgttcctggaaacgttcagcctgatcttctgcgtcgtttaattcgctaaaaccattaccgatttcacgaccaccgatgaagaattcaaaacggtcggtgatttccgggttaacatcattacggcgtgccagcggggacacttctgccggatattccgtaataaaggttggctgaatcagatgtgcttctgccacttcatcaaagatctctgtgacaatacgtcccaacccccagcttttctctaccgtaataccgatagattcagctaatgctttagcagcatcaaaattatccaggtcggccatatcggtttctggacgatattttttgattgcttcgcgcatggtgagtttttcaaacggtttgccgaaatcaaacacatgctcgccataagtgactttagtggtacccagaacctcttgtgccagggtgcggaacagactctctgtcagttcaatcaaatcgtggtaatccgcatacgccatgtagagttccatcattgtgaactcaggattatggcgaacagaaataccttcattacggaagttacggttgatttcgaatacccgttcaaaaccgcctacaaccagacgtttcagatacagctccggcgcgatacgcagatacatatctaaatccagagcattatgatgggtaataaacgggcgagcagatgccccacctggaattacctgcatcatcggggtttctacttccataaagccgcgcgcgaccatgaattgacggatagcggccagaattttactacggacaacaaacgtttgacgggatttatcgttagcgatgaggtccagataacgttgacgataacggacttcctgatcctgcagaccatggaatttatctggtaaaggacgtagtgctttagtcagcaggcgcagctcagtacagtgaatggaaagctcacccgtttgcgtcttaaacagcgtaccgcgggcaccgataatgtcacccagatcccattttttaaactgatcgttataaacaccttctggcaggctatctcttgcaacgtacagttgaatacggccaccgacatcctgcaacgttacaaaggaggctttccccatgatacgacgggtcatcattcggccagcaacgctgacttcaatgtttaaggattccagttcctggttatccttcgcatcaaactcttcgtgcaactggtcagaggtatggtcgcggcgaaaatcattgggaaacgccacaccttgctgacgtagtgccgccagtttttcgcggcgatttctcagttcatcgttaaaatcaatagcctcattggctccccgtgtttcttgttcagacattttggttcctctaaatccagctttcaatttagcgtagataaagagacagatcggtacactgtattatctgcctcgactattagtaactcagtttatcttatcgaaactaacgcttacctcaagttgatatcactaataaataaccatcaaaatggtttaaatgacttattaatctcgatttgttagtgttataaactaaaagttaatttattcataaccaattgtttttacgacagttaatcgttgctctcctgtatcatattcgtcggcgtgctaaacagaaaacgggtagcaaaggccaatacgacgatgatcgcgacacaagccaacgtccactctcccatctgagaaaagaatcgctggtaagctgcaattgccataccgctaatttggctctctgtcgtctgctgtgccacgacgcctgccagccagttggcgaccgcgcctgttgccagcatataaatcccggttaatacgccagacattttcagacgcgtgatttgcgcaatcgccaccgggtcaataaagagttcggcaaagcccattagcgccagcccggatatcatcacgcccatactcgcttgaccgtcagccgctgcatgtcgggcatcaaatgccaacaacataaagccacaagccatcagcagtaagccaaaggcaaacttcagccagacgcgcaatgtactgttgccgcggctttctgggctcgccagccaggccagtacaaccccagcgagcatcaccgcaattgcattcacgctctggaatagtgctgtaggtacttcaatattgaatgcctgacgattcacaaagcgatcgataaacaagctgatggtactgccgccctgttgtgccagtacccagaacaatgtcccgacaaacatcaacaatacaatttgccaaagagcacggcgatgttcggggaatttgatcatcatgcgggcaatgatttgtgcggcaatgaggcaaacgatcgccagcaaatatccggaccagtcgttctccagcagcagagtaaaaaatactggggctaaacagagcatcaccactaaccagctccatactggtaaggcaaatttgacactagtgagcgcttttttatccatactacgtgtggactggaaatgacgatgaccgcttaagaaaatcaacaaaccgataaacatgccgccacccgcaagggcaaagccaacatgccatccataccactgagcagccaggccgcaggcgattggggctgcgatagaaccgatattgcccgcagcatacagcaggctaaaaccgccatcacgtcgatgatcgttctcgtcgtagagctcgccaagcaaacagctgatgttacttttgaataaaccgtagccacaaataatgattgccagcgccagatacaggctaaaggtactatttgtatcaatacccagcaccacatggccaagggtcattaacagcgcgccggcaatcactgcagtgcggttgccgagcaggcggtcggcaagccagccgccgagaataggggtaacgtaaaccagagaagcatatgcgctgaacaggctgatggcatggttatcatcaaaaccaagctgatgggtgagatagagaatgagtaaggcacgcatgccgtaaaaactgaagtactcccagatttggatcgccacgatatagtatatcgcgcgcggctgactgggtgttttcatgtgttctccttatgagcaaaaaagggaagtggcaagccacttcccttgtacgagctaattattttttgctttcttctttcaataccttaacggtatagcggccatcagcctgacggtatgcaccgtgaatatcggtttcaaagcccggatagtgagcgccgatttcacacagcatctgcaggaactccagaaccggacggctttcttcggtgatcatttcacccggcattaccagaggaactcccggcgggtacggaaggatcatattggcgttaatacgacctaccatttcgtcgaggtaaacttcttcggtcataccgtgcagctctttctggaatgcagcatacggagtcattaccatcgtcggcagcacttcaaatgcgcgatacatcagatccggcagattgtggtgaacaatcagtttgtggatattctgagccagttcctgaatacgcatgttttcatagaattcaggatcttcacgatacagagacggcagcatgtttttcacacgcaggttcaggtcgaacgcacgtttaaagtcagtcagagcacgcagcaggctcagtgctttggtcttatcgataccgatgctgaacaggaacagcaggttatacggaccggttttctcaacaacgatgccatgttcgtcgaggtatttcgccacgatgctggccggaataccaaagtcgctcatggtgccgtctttttccatccccggagtcagcagggtgactttgatcgggtcaagatacatgtgctcgttatcgatgtttttgaagccgtgccaggtgctgtcagaacgcagcggccagcattcagtcgtatcgatatgatccggctgccatacatcaaagaaccagccatcagattccgttctcagacgtttgatctctttacggaatttgatcgcacgttcaatagaaccgttgatcagacgcttacctgcattgcctttcatcatcgccgcagcggtttcagtggacgccacgataccgtagtgcggagaagtggtggtgtgcatcatgtaggcttcgttaaaggtttcttcgtttacgtcacctttaacgtggatcatggaagcctgagagaacgccgccagcagtttgtgagtggactgggtttcgtaaatcactttcccttctacacggccaccgctcataccgcatttaccttcgtaaatcggactgaagttggtgtaaggcacccacgcggagtcaaagtggatggatttcacatccagtgttttcttgatgaagtcggtgttgtacagcagaccatcataggtagagttggtaattacagcatgtaccggccaggttgcgtttggtgtttctttcacgcgcttagcaatggtagcgtgctggaattcactctgtgggataccaccaagaataccgtaagcgttacgggtcgggcggaaatagattggcgtaacatcgctcatcatcatcaggtgggtcaggcttttgtggcagttacggtcaatcagaatggtgctgcctgctggagcagagtacataccaacaattttgttcgcagtggaagtaccgttggtcaccatgtagctgcggtctgcgttaaagacgcgagcgatatactgttctgcttctttgtgtggaccactgtgatccagcagagaacccagttcagatacactaatggaaatatcagatttcatggtattcggaccaaagaaatcatagaacaggctacctaccgggcttttctggaatgcagtaccgcccatgtgaccaggagtacagaaagtatatttaccttcacgaacatatttaaacagtgctttagtcagcggaggcagaatagtgttgatatattcgtcagtggtctgcttgatcttattagcaatatcttcagcagcacccagcgcatattcaaagaagctaatctgtaaacgcaggtcattcaggcttacatcgagagtggaatacgtattagcgaacgcgtacaacggcaggttctcgttcattttgctaatttcttcgcacagctcgagattatatttatcccagtcaaaaataacgccgcacagacgcgcattgttttcgatcagttttaataagtcgtcacggtcgttcgggtaaacaatctggaagttcagacgttcaagcgcgcgatgaagttcacggatgggttcttctttaaaataaacccccatgtgattcaatattgcaataacgttcatagtcatatctccaggtaaaaaaggcccctcccaacacatgggacaaaatgaaaggaggagcctcggaaaatacttttaattaatgtgcgttagacgcggtgtggttatccatactgtggctctggcgctcgtgcattttgcgagcgtagaacatcaggataatcaggctgacgatgaaggtacctgccagctcgaaggagcttgcgcccatcagcgcgatgaagcagaacacgcaacccagtacagagcagatcaggctgacaaagttgcggatgttaacgccttcaaaacgaatcaggtcaacgcaagagtagaaatacggcagcatagtcagcagtactgcgataccggtcagttcaccgaacaggtcagatgctttaccaccggcagagttcatcagagtgataaggatcatcagggcagtcattttcactgcagccagcagcagaccttttttcggaataccgttgctgtcgacttcaccataaactttcgggaagttaccgtcgttagcggcacgtacacctgcctggcctaccaacatcatccaggagcccagagaagtcaggcacgcaaaggcggtgaatgcagaaaccagcggcgcagcccagttaccgaggatagtactagcactgattgcaaacggagcaccggaagccgccattacagaagacggatacataccggaaagcacctgagtcgcagcgatgtaaacaatacctgctaaaccagtacccagcatggttgccagcggaacggtacgtttcgggtttttaaccataccagtacttacagctgcggattcaacacccacgaaggcccacaggcagagcagaatacttttaatgatcgcatgaccatcagtggtatccgcagtattccagttagctgcataagttgccgcatcaaaccaatgccagccaacaatagcagtcatcaccacaggaataagaaccagcaccagaccaatagtggttaaacggcttacccaagtaccgccgagcatatttacaaaggtaaatacccagacgatagcaatacaggcgatacccgccggaacaggatcatttaatactgggaagaaggtggaaagataagatacagcggtaataccaatcgccaggttaccaatccagttagcatggtaataaagaacacctgtctgaaaaccaaatgcaggggaaatttctccggcataagcaattgggccaccttgttgcgggttttttgttgccagtcgggcatatacatacgccaggctcattgcaccaataatagagataatccaaccccagatagcaataccaccgatacttgctaggttcgcaggtaataatgcaataccgctccccatcatattaccggcaacaacaccggtacaggcaaatagcccgatcttcttggcagaactcatgctcttctcctaatttcatttttgaatttggagtccgggtcatgatgtataactatttcctgaccagaccaaactggcgataagattactcacgaaaaaaggattaatcctaaagattaggtgaaataacacaaaagtttctgtaagtgagaacttgaggttttttattaacacatcaggatcgcaagttgatatcatgaaaagataaacatttaatgtttacaatggattgcgtgacattctctggttaaatttatgtaataaaaattatgcggcaaataaattgccgcaacatattataccaacaggaacatacaaaaactcaacaacaaatatttccgagcataaatcaacccggagttacttattcactagcaagaaatttgtcgagataaggtacaacataaggaacagaagtctggaatataccattttcaatccagtaaagggtgtttgcccctgggcgtaaattaaaggcggtgagatatgcatcagctgcttcccggttcatccccttcatttcataaaccttgccaagcaacacataatttagccaggacatttcaagatcaatgccagtatttatcgcctggtaagactcatctgttttaccttttaccagagcactgaccgcttttatttgatatataatggacaggttgttcaattccggcagtgtaacaatgttatctatttctgtgttcagtgctgctaattgtttttcatctaaaggatgttgagaatggcgcacgatatcaactaatgctttttctgctctcgcgtaggtaaattctggggaactttgaacaatctcacctaataattcactggcacggttcaaacttttatcatcgccatgcagtaaataatcatgtgcctgataaaaattagttaataacgcaccacgatgcggcaaaattttctggagcgtctcctgcattcgttgtggccacggttggtttaacgctttacttaaactctccagtaaatcattttgaatcgccagctgattaccgttagtgatgacataacgtttatccagcatggtactaccatctgcattgtctaccaattttatgctcataaagcattgttgagcacggtattggcgctgattaacaaacgcaatagataatgttttaccggaactgctcggttcatcaatgttgtagttgattttgtcatgcaccataaaggtggagaaggtgttaagacttgtcgccaccaaatcacccacgcctatcgcgtaagagagctgatacggggaactccagctgttacaacttttatttaccatattaatgtcaatatcgcgtggattgagcaaaatacggcttttgctcataggaagacgtgtatcaagactactaaacgctaccagtgctacacagatacctaagctcaacaggaaaaaaaaccatacccaaaaggtagtgaatcgtttgcttttaactggggattgttcaggtggcgttgcggtgttttgaatgttaagactgtgggagggagaatctgtggcaggaaccgcctctggtatagggggagggctagatagcattatttcctctccctcttcttcgctgtaccagataaccggcaccattaatttatagccgcgctttggtacagtagcgatatagacaggactatcttcatcattatcttttaaactcttacgtagttcactgatactctgcgtcacaacgtgattggtgacaatacttctcttccagacattatcgataagttcatccctgctaagtacttcgccactgtgttgagcaaagaaaaccagaagatcgattaatctcggctcaagggtaagttgacgcccattgcggctaatttggtttatggacggagtaacaagccattcgccaacgcgaactacaggttgttgcataatagaaactcattcgaaaagggaatgatgcaatgataattgccacaacctatttttaccatctatagatgggtttatttacatattattggtgaatgcaagacgttatttttaccagccataaacttcttgattacatagtattacgaaaggattttactgagaaccagaagtaatattccttaccatcaaaattcatcatctttgccaaagaaaaatgttcagaaaataatccatggaaaattgtccggagcacttactattttaatggattgttagtctttgcatgagcaagcgaactgatacatttctctttgttctcattcagaaaatctcatcagtcgccgttcagaccggtgttgtgctttatggatgcgttacgctcctgatgacgtcatttgacgttcaacagcatcacggggccgcacgacatttcacgtcagttagtgctatagctcaggaacaaattttcccgaattgggatatgcccgcaaattgctggtgatgtggggagaatctggttgagttcggtagaattgatttggaggcagaacgcttaaatcgtggcgtcctgaaacgaaaaacggacctccgtggaggtccgtttatatgaatttggtgcccggactcggaatcgaaccaaggacacggggattttcaatcccctgctctaccgactgagctatccgggcaacggggcgcattaaaccgtaatctgcacatctcgtcaacctaatttcagtaaaagcgattcaactgcttaagattgcggcaaatcgcttcttttctgtgtttctgtcaggtcaatgcaccaccctggcggcagcgggcgaagcgcaggatatcttccgccagccgatgtgcagtgtcgacatccgcctggctacgattcaccagcattcggcttaaacagccttccagcaccagttccatctgctttgctaccatcgccggatcgtcaacttccagtgtggttaacagttcgtgggtgaaatcgtaggccgcgcttttttgctgatcggccagttgatgaatagggtggccaggatcgggataaaacgtacaggcagcgataaatagacagcccggatagcggttgtttttaacgcactcgcttaacgcctgataacgtgccagcagcttttgttcggcggtttgcgtttcgtccagcatcagctgacgacgccagacatctatctgttggctaagataacgcagcgcatcgtagaggattgcctctttgtctggccagaagcggcgtagctcgtccagtggataatccacacgttcagcaaccatctccagcgtggtgttggcaatcccttgtaattctaataatttcagggcttctcccagtacatcttcacgttgcacgctattttcctccgtctttcccactgcaagtgtcgttcacggttggcgatcgcgcaaatgtgcgctgaaggtttcagcatccataaagcccgtgacgcgtgcttgtggatgctcctggccttgtccgtcaaaaaagagaattgtcggtaggccaaggacattaagatgctttaacagcgccacatcttgtgcgtcgttggccgtgacgttggcctgaagtaagaccgtgtctgctaacgctttttgcacctgcgggtcgctgaaggtgtatttctcaaactctttacaggcgacgcaccagtcggcataaagatctaacatcaccggtttgcctttggcttcaacgagcgcctgatttaactcatctaccgttttgatttgtgtaaagttgagatgcgtctgagtttgcgcggtatgcgtcgcaccaaatgcccaatcctgaagtgggcgcacgctaaccaatgccgctgccagcagaataatttgcacaatacgcatccagccgcgtttagcctgtaggctggtgataaaggcccagccaaagaatgcgacacccagcgcgctccacaagcgtaatccccatacatcaccaatcactcgctccagcaggaagaccggcagtgcgaggatcacaaaaccaaacgcggttttgacttgttccatccacgggccgcttttcggcagcaagcggttaccaaagacggtaattagcatcagcggcaggcccatgcccaacgcatagagataaagcgtgccgccgcccagccacatgttcccgctttgggcgatatacagcagaatcgcgctaagcggtgcggtggtgcatggactacagatcagtccggcaatcgcccccataacaaacacaccgccaggactgccgccctgttggcgattgctcatcaacgtgagacgtgtttgcaggctagaggggagttgcagggtaaacaagccaaacatactcatcgccagcaaggtaaagacgatggcgaggccaatgagcacgtatgggtgctgtagcgccgcctggaactgtaaccctgcggcggcaaccaccagacccagcgccgtgtaggtcagcgccatcccctgcacataaataaaggtcagcaacaatgctctggcagtggagagccgctgtttaccacccagcacgatgccagaaatcagtgggtacattggcagcacgcatggcgtaaaggcgataccaataccgatcaacaacgcccagagcgcggaaaagggcaattgcgcggtgggctgctcttgctgcggaacagacacaggctgtggcgctgcgttgttggcgaccacttcgcttaacggaacggttttggtttctggcggataacagaaaccggcatcagcacagccctggtaggtgacagttaacgtcgctcccgcactcgcctggttgatggtgacgggaagcgtcagccgatcgcggtaaatctcgcttttgccgtaaaactcatcttcatgccagacgccttgcggcagctgcacgtcggcaattttcgcgtgttccggcgtaatgcggatctgtttacggtagaggtagtaaccgtctttgatctgccaggtcagattaaggtcatgttggttttgctgaaaatcaaaagcaaaggcttgatccgcggggacaaattgactacgtcccggcgcgtcgaataatccggcaaaaacggaagtgctgcaaagtagcaggatcagcgtaaagatgcgttgagccatgagaggtaatctgtgtctccttatgtcagcgtaaagatgcgttgagccaactgaggtaatctgtgtctccgtgtgtaacaggtaaaaccagaagttccggggtttgatatggatgatgagacttcaggcattccagcagtgcctgctggtgagatacggtagtttttaaaatcatctgcacttcgtattcttgctccagcttaccttcccagtaatagagagaggtagcgccggggatcaaggtcgcgcaggccgccagtttttccgccagcactttggcggctaaatcctgggctgtcgcttcatctggtgccgtacatagcaccacgacagacgcggtattgctacttttttcatcaagcataaacacctcgcaagaacagatggaaccgcaagagagaggtcactatacaacggacgggggaaggatgttagtcggcgggaaagaaagcggggcgtgaacgccccgcgattgatcattacagcatgaagctacccagcacgaagccgaagcaaacggccagggcaacacccagagtacccgggatgaagaacggatggttgaagacgaatttaccgatacgggtagtacccgtgtcatccatctgtaccgcagcaaccagcgtcgggtaggtcggcagaatgaacagaccagacaccgcagcgaaagaagcaacagcggtcagcggactaacgttcagtgccagagccatcggcatcagtgcttttgcggttgcagcctgagagtacagcagagcagaagcaaagaagaagatgacggccagcagccacggatgaccctgaatcacttcaccagcggtatctttgatccagtcgatgttgttggaaacgaaagtatcgcccagccacgcaacacccaggatacaaatacaggcgctcatacctgctttgaaggtgctggagttgaggatgttgtcggtatcgactttacagataacggtggtcagagttgcaacgctgagcatgatgatcaggattgcgttggtggtgttcatcagcggtttttcaaccagacccatgcttgggctgttgatgattgcatagataaccacgccaactacgcccagcaggaacagccagacggacgtttttgcaccggatttgatttcaatctgcttttcaccgcgcagttcaaccaggccctcttccagacgcttgcgataaatcggatcgtcagagagtttggagttgaacagcatagtgaccaggaaggacatcaccagaaccgccagcagggtggacgggatgaccacggagagcagatggaggtagctgatgccatgaccttccatcacggaagacatgtaaaccactgccgcactgattgggcttgcggtgatcgcaatctgcgcggataccactgcagtagacagcggacggcaaggtttaacgccttgttccttcgcaacttcagcgataactggcagtgtcgccagagagatgttgccagtaccagcaaagatagtcaggaaataggtcacgatcggtgcgaggatcgtgatgtatttcgggttacggcgcagcagcttttctgtctgatgaaccagatagtccagaccgccagcaacctgcatggcagaaatagcggcgataaccgccatgataatggagatgacatcgaacgggatgttaccgggtttaacgccaatagcggcaagaaccagcacccccaatccgcctgcaaaaccaatacctattccccccaatctggcgcccaagaagatcgccagcaaaactatgatgagttctacaactagcatattagccttccttgttttttaacaagttgatattagattgttatttttaagttactgctcacaagaaaaaaggcacgtcatctgacgtgccttttttatttgtactaccctgtacgattactgttcgctttcatcagtatagcgttttgctttgtaagccgggtgcatcagattctgtacggagaaaatatcgtcaagttccgcttcagtcaacagaccgcgttccagaacgacttcacgtacactcttaccggtttcggcacagattttacccacgatgtcaccgttgtggtgaccgatgaacgggttcaggtaagtaacgataccgatagagttgtaaacgtaaccttcgcacacttctttgttagcagtgatgccgttaatgcatttttccagcaggttgtagcaagcgttggtcagaatgtgaacggattcgaacatggcctggccaatgaccggctccataacgttcaactgcagctgacctgcttctgctgccatggtaacagtggtgtcgttaccgatgactttgaagcatacctggttaaccacttccggaacaaccgggtttactttagctggcatgatggaagagcccgcctgcagttccggcaggttgatctcgttcaggccggcacgtgggccactagagagcaagcgcaggtcgttacagattttggacatcttcacagccaggcgtttcagcgcgccgtgaaccataacataagcgccgcagtcagaggtcgcttcgatcaggtcttcagccggtacgcatgggaagccagtaacttcagccagttttttcactgccagcggagagtactctttcggcgtgttcagaccagtaccgattgctgttgcaccaaggttaacttccagcagcagttcagcggtacgttggatgtttttcacttcttctttcagcaggatgctgaaagcgcggaattcctgaccgagggtcatcggtactgcgtcctgcagctgggtacgacccattttcaggatgtcctggaattcgacagctttacgttcaaagccttcacgcagttggttaatcgcatctaccagcttaatcagggaagagtaaactgcgatacggaaaccggtcgggtaggcgtcgttagtggactgacatttgttaacatggtcgttcgggttcaggtactgatattcacctttttggtgacccatcagttccagaccgatattggccagcacttcgttggtgttcatgtttacggaagtacctgcgccgccctggtagacgtctaccgggaactgatccatgcattttccgttgttcaggacttcatcacatgcggcaatgatggcattcgctacacttttaggaatggtttgcagctctttgtttgccatagctgcggcttttttaaccattaccataccgcgaacaaattcaggaatatcactgattttgttgttgctgatatagaagttttcaatcgctctcagagtgtgaacaccatagtaggcatcagctggaacttccctggtacccaacagatcttcttcgatacgaatgttgttactcatgtgaaccttctttttcaagctgccaatgatttgctttaaacacacagaatatatgtggtttcgaatgtttttcgaccgacgattatcccctgcatcgaccgaatacccgagatcatatgctgcttgaggatttctaccgtaatctggatcactttaagtgtcggtttttaccccttaattattaatttgtgaaatagatcaccgctttgggattactaccaaaaatagttgcgcaaacatcttgaaattttgctaatgaccacaatataagctaaacgcgattcgcaacccattcaggtagccggggttaaccggctgctattacaggagaaacctttgcgctggttaccttttattgccattttcctttatgtctatattgagattagtatctttattcaggttgcccatgtattgggggtattgctgaccctcgtgctggttatattcacgagtgttatcggtatgagtctggtacgtaaccagggctttaagaatttcgtgctgatgcagcaaaaaatggcggcgggtgaaaacccagcggcggagatgattaaaagtgttagcctgatcattgctggtttgctgcttttattaccgggcttttttaccgacttcctcggtcttctacttttattgccgccggtgcaaaagcatctgacagtgaagttgatgccgcatttgcgcttttctcgcatgcctggcggcggttttagcgccgggaccggtggcggtaatacttttgatggtgagtaccagcgaaaggatgatgagcgcgaccgccttgatcataaagacgatcgccaggattaatgtcgaaacgccggattatgtggttatgccattttccggcgtttttcgttttggcagcaacagccataaccccgccagcatgatcagcgcatagagacttttccagccgaccattgccagtaacagaacgcataacagcccgccaaccaccgccagtagtcgataacgtccttgcaataatttacagcctgccagcatgcataacagataaatcataataaagatgccattggcataaataataagagcgtccagattgatctctaaagcatgaatcaccaaagtgctcaccacacagcagccgagcaccgcattgagggcattattcgggatatggcgagaagagaggcgtgccaggtagtggtcaggattatgttgcgcctggctccagaccaggcgggcgaagctctgtatataaatgttgagactggcaaagcaggccagatagccaatcacgcaggcaatccataacgctcctacaccgaacaactgcactacaatttttggaaggcttgctgccgccgccattttttcaccataggcgtcgaagtgtaagacgactaccgtacagccccagtagactaatcctgccagcagcagaccaatcatcaaagcacgaggaaaatcacgctctggatttttaaattcgctggcgagatgggcaaatgcctccagaccgacaaaacaccagaacatcacacttaacgcagcaaataacccggtaagttcgatattaccaggtgccggaaaggggatattcgcaggtttgatatcgcccgcccaccagatagcgacaatcagcgcgacgataagtccggcaataacggtttgtagattagcactggaactggcaccgcgagtaccgatataccacaccagcgccagcgtaccgagttctgccaacaacagttgccagctatgccagccaaacatcgcctggccgaacccggcggcaatttgtagtgcggcaggcaaacccacgggaatgacgcttaaaaacagccagccggtgactcgctcaagccggctaccaaacgccataccgacgaagtgcgcgacgccgcctgcgctgggatagtggcgacccagaatcgcaaacacaatcgcaatcgggaacactaagataatcaaaacgggccacgcccacaggctgttattgcccgctaccagcgcagctaacgcaggaacggcaaacacgccagtgcctaataaactcgtgcttagcaggccaatgccctgggccagccccagttcttgtttgagtccactcatgggttgatgtccgattgcgcccaaattttgggcaactgcgtagattttcgatggtagcacaatcagattcgcttatgacggcgatgaagaaattgcgatgaaatgtgaggtgaatcagggttttcacccgattttgtgctgatcagaattttttttctttttcccccttgaaggggcgaagcctcatccccatttctctggtcaccagccgggaaaccacgtaagctccggcgtcacccataacagatacggactttctcaaaggagagttatcaatgaatattcgtccattgcatgatcgcgtgatcgtcaagcgtaaagaagttgaaactaaatctgctggcggcatcgttctgaccggctctgcagcggctaaatccacccgcggcgaagtgctggctgtcggcaatggccgtatccttgaaaatggcgaagtgaagccgctggatgtgaaagttggcgacatcgttattttcaacgatggctacggtgtgaaatctgagaagatcgacaatgaagaagtgttgatcatgtccgaaagcgacattctggcaattgttgaagcgtaatccgcgcacgacactgaacatacgaatttaaggaataaagataatggcagctaaagacgtaaaattcggtaacgacgctcgtgtgaaaatgctgcgcggcgtaaacgtactggcagatgcagtgaaagttaccctcggtccaaaaggccgtaacgtagttctggataaatctttcggtgcaccgaccatcaccaaagatggtgtttccgttgctcgtgaaatcgaactggaagacaagttcgaaaatatgggtgcgcagatggtgaaagaagttgcctctaaagcaaacgacgctgcaggcgacggtaccaccactgcaaccgtactggctcaggctatcatcactgaaggtctgaaagctgttgctgcgggcatgaacccgatggacctgaaacgtggtatcgacaaagcggttaccgctgcagttgaagaactgaaagcgctgtccgtaccatgctctgactctaaagcgattgctcaggttggtaccatctccgctaactccgacgaaaccgtaggtaaactgatcgctgaagcgatggacaaagtcggtaaagaaggcgttatcaccgttgaagacggtaccggtctgcaggacgaactggacgtggttgaaggtatgcagttcgaccgtggctacctgtctccttacttcatcaacaagccggaaactggcgcagtagaactggaaagcccgttcatcctgctggctgacaagaaaatctccaacatccgcgaaatgctgccggttctggaagctgttgccaaagcaggcaaaccgctgctgatcatcgctgaagatgtagaaggcgaagcgctggcaactctggttgttaacaccatgcgtggcatcgtgaaagtcgctgcggttaaagcaccgggcttcggcgatcgtcgtaaagctatgctgcaggatatcgcaaccctgactggcggtaccgtgatctctgaagagatcggtatggagctggaaaaagcaaccctggaagacctgggtcaggctaaacgtgttgtgatcaacaaagacaccaccactatcatcgatggcgtgggtgaagaagctgcaatccagggccgtgttgctcagatccgtcagcagattgaagaagcaacttctgactacgaccgtgaaaaactgcaggaacgcgtagcgaaactggcaggcggcgttgcagttatcaaagtgggtgctgctaccgaagttgaaatgaaagagaaaaaagcacgcgttgaagatgccctgcacgcgacccgtgctgcggtagaagaaggcgtggttgctggtggtggtgttgcgctgatccgcgtagcgtctaaactggctgacctgcgtggtcagaacgaagaccagaacgtgggtatcaaagttgcactgcgtgcaatggaagctccgctgcgtcagatcgtattgaactgcggcgaagaaccgtctgttgttgctaacaccgttaaaggcggcgacggcaactacggttacaacgcagcaaccgaagaatacggcaacatgatcgacatgggtatcctggatccaaccaaagtaactcgttctgctctgcagtacgcagcttctgtggctggcctgatgatcaccaccgaatgcatggttaccgacctgccgaaaaacgatgcagctgacttaggcgctgctggcggtatgggcggcatgggtggcatgggcggcatgatgtaattgccctgcacctcgcagaaataaacaaacccccgggcagaaatgtctgggggtttttcttttggtcatctttctagtataagattcagacacggacgacgcgagtggcgtccagctcattgattatggggaataacatgcacgtaaaatacttagcagggattgtcggtgccgcgctactgatggcgggttgtagctccagcaacgaattgagtgctgccggtcagagtgtacgcattgtggacgagcagccaggcgcagagtgccagctgattggtactgcgacaggtaagcaaagcaactggctttccgggcaacacggagaagaaggcggttctatgcgcggcgcagcaaacgatctgcgcaaccaggcggctgcaatgggcggtaacgtgatttatggcatcagtagcccgagccagggaatgttgtccagttttgtcccgacggatagccagattatcggtcaggtttataagtgcccgaactgatgtgatccagaggctgggtgacaaacgtataattgcctgatgcgcttcgcttatcaggcctacataaggcattgcaactgattgaatgcttgagaatttgtaggccggataaggcgtttacgccgcatccggcatgaccaacgatcacgttatcagtcatttcaggctggatggctccagcctcgcattagcaaagatgagattatttcgcctgtggtgcagttttgctggtggattgaacacgtaagtgatgcagcgcgcgtaagcattgatcctgggttagcggttgggcgttattcgccgctacggtgcgaacatagacctgacatggcacacccgcgagttttttcagtcgtgggctgaaatcaagcattcggcgagtgatcgcttctatttctttacccggcgttgcttcacgcgttttcaccactgcgccgctaaattgttctttgccactttcatctttaaagcggtaaagcaccgccagataatggtcgaacaagttatgtttccattccggttgggaataggtgtcatattccagattgccattgtcctggcagtcaacgtcgtataacggcaggaaatctaacagactggtaatacgtaatgccagttcacgcatttccgcattattaattgcatgaatgattgctcgcgccagcatttcaatctgcaactcattgacgactaactcacatttgctaccgtcatgtagcgttaatacgaaggtaagattttcgccttgattatcggtaagttccagcgtgttaacccgacgattaatatcggcatttttaagctcatcaaccagaatttctgggatgttttctgccattttcttaatgactttatcgcgagcttgctcatactgaaggtgtgcagcagcatccagtttatgcttttgatgcagacgactttccagcgcaatcagcaggtcgcgcagttccatgacagacataaagaacaagctttctttattgcgaggttctttaattttcagcgccagtgcaatgaaattattactcttgcgaataacaccggtattaacacccttgatgcttatggccatgtaggttctccctaaccatttctcaattaaataattaattttaatttataagccagataaatgggcttggtagtaatagttgttaaaataacataaatagccgtactcactctatataaacagaaaagaaaggttaattattggtgttagctatataaaaagtaacaacagcaatgcatatgaataattaaaggttatgcaacgggcaaagattaaacttcccagtttaatgacaggttgctgtacttgcgtttgttgctcttgccggatgcagcgtaaacgccttatccggcctacagttcattgcaaatccattcaatttcaatgcacgatgtaggcctgataagcgtagcgaatcaggcaattttaatgtttaacttccctgtttaatcagttactgctggcgtagctggagatccagcggcgttttgctgggttcgccgccaatttctcgcgccagtttcggcaccagatatccgctcaccagtgtcagcaactcacgcataatctgccgtgcttcgtcatcactcaccataaaatgcgccgcgccctgtactttatcgagcacatgcaggtaatacggcattacgccggcatcgaacaacgcattactcaggtttgccagcgtttgtgcgttatcgttcacatcacgtaacagaacgctctggttcagcaaagtaacgcctacccggcgcaacttagccatcgcctgacggaatgtttcatctacctcattggcatggttgatgtgattcaccagcaagatttgcagcgtagaacgggcaaagcattcaaccagcgcctcggtgatacgtgccgggatcacaatcggcagacggctgtgaatccgcagacgttttatatgcgggatggcttccagttgtgtgagcaaccagtccagctcgtgatctttcgccatcagcggatcgccgccggagaaaatcatctcgtccagttccggatgcgcagcaacatactcaagtgcagtttgccagttacgcttgttgccctgattttcggcataggggaagtgacgacggaagcaatagcggcaatttaccgcgcagccgcctttgaccagcaaaagcgcccggttgtggtatttatgcaacaaaccaggcactacgctgtgctgttcttccagtgggtcggtggagaatccgggcgcgatgacaaactcatcttggctggtaagtacctgacgcaaaagaggatcgtccggattgcctttctccatgcgatcgataaaactgcggggcacacgcagggcaaaaagctttttggcgctgcgtccggctaacagtttttcctccgcgtctatattcaaaagacgcagaagttcatcaggatcggtcacaacatcggcaagttgcgttaaccaatcttctctggatggggtatttagggttacaatatgcgccattttgtggcttagctaccaattaacaaatttcagagggccttatggcaacgtactatagcaacgattttcgtgctggtcttaaaatcatgttagacggcgaaccttacgcggttgaagcgagtgaattcgtaaaaccgggtaaaggccaggcatttgctcgcgttaaactgcgtcgtctgctgaccggtactcgcgtagaaaaaaccttcaaatctactgattccgctgaaggcgctgatgttgtcgatatgaacctgacttacctgtacaacgacggtgagttctggcacttcatgaacaacgaaactttcgagcagctgtctgctgatgcaaaagcaattggtgacaacgctaaatggctgctggatcaggcagagtgtatcgtaactctgtggaatggtcagccgatctccgttactccgccgaacttcgttgaactggaaatcgttgataccgatccgggcctgaaaggtgataccgcaggtactggtggcaaaccggctaccctgtctactggcgctgtggttaaagttccgctgtttgtacaaatcggcgaagtcatcaaagtggatacccgctctggtgaatacgtctctcgcgtgaagtaatgcggttgtggtgcggcctgcaggctgcaccatcacttattcaggtcagagatgatgaaacgccttatcgttcttgttttgcttgccagcacgctgctcacgggctgtaacaccgctcgcggtttcggcgaagacatcaaacatctcggcaactccatctctcgcgctgccagctaatttttcttctcttccgaaaaatcatcagattcccatcatttttggcgatgttgtctattattaatttgctataggcaaacataaataacattacctaaaaggaagacgttatggtgaagaagacaattgcagcgatcttttctgttctggtgcttagtacagtattaactgcctgcaacaccacgcgtggcgttggtgaagacatttctgatggcggtaacgcgatttctggcgcagcaacgaaagcgcagcaataagcaataacggtacgacagctgtgtcgtgccgtttgttttttctgcgatagtcacaaaggtaatagttgaaattcccctgccacctggcaaaatatccgttcaaccatcagctttgcaggacgacctgcaaacgcctcttttcaccggggacggccccaattctccggagcctgatatgtcctggattatcttagttattgctggtctgctggaagtggtatgggccgttggcctgaaatatacccacggctttagtcgtttgacgccgagtgttattactgtgacggcgatgattgtcagtatggcgctacttgcctgggcgatgaaaagcttaccagtagggacggcttatgccgtgtggacgggtattggcgcagtcggcgcggccataaccggcattgtgctgctcggtgagtccgctaacccgatgcgcctggcgagtctggcgttaatcgtattggggattattggtctgaaactcagcactcattaactaccaggctgctgtacccaaataaatttactgacatcaaacccttcccgggtcgcgactgccagcatctcctgtttcacttcgtcagaaatggttggcgtgcgggagagtatccacaggtagtcgcggtccgggccgcaaaccagcgcatggcggtattcccgatcgagtgcaataacgttataaccgccatagaaaggaccaaagaaactcactttcagcgcagcgcgagttggtgcgccggtaaagtacgctttcccttcactctgctgccacattcctctgtcagggttatagcctttattaatgacattcaggccgccgtcatcacgcaggctgtatgttgcggtgactttttccagtccacgttcaaagcggtgatcaaaacgggcaatctcataccaggtaccgagataacgtttggcgtcgaaattatttactacggtcacgccacgcggcggcgtaggagaactgcaggcaacgaccagaaatgcagctgtcgctgcggcaacgagagggagcaggcgcataaatgtttccttactggtttttttctaagtgtagatgacagcaaggaaaagcggagaaaaggtccgaaaattcggacccgatggaattttactgtagagcgttaagaatctgccaggcggcgtcgactctcgctggattgggatagtttttgtttgccagcatcacgatacccagctctttttctggaataaacgcgacatagctaccaaatccgccggtcgcccctgttttatgtacccaacttgcgcgtactgcaggagttgggggcgtaatcgcttttacggggcgtgctgccagtgcaattttattgtcactgccgttaatgatgctgtcaggatttaccggccagtccagcatttcccagcccaggccctgatacatatcgccggtttgccagtagcgagattgtgccagttgtatcccttgttgaagcgttttctcattgatatcaaggggttttaaattgctttgcacccagcgggccatatcttcaatggtgctcttcacaccataagcttcagcatctaacgccccagggctaacatgcactgccttaccttcgcgatatccccaggcgtaattcttttcttctgcgggcggtacattaatccacgtatggttgagtttgagtggctggaagacacgagtttgcatcgcctgctcaaaactcaaaccagacggcttcacagccagtgcgccgaacaaaccgatactggagttggcatacagacgttgtgttcctggagcccatgcaggctgccagttttgatagaagcgcagcaagtcgctactggatttcacctcatccggcacctgcaatggcaggccgccagcagtgtaggttgcgagatgtaatagtgtgatcccattccactgtttagcggtaagttcaggccagtattttgttgtgggatcgcttaacttgatttcccctcgagcaatagcgtcgccaccaagcacgccagtaaatgttttgctgacgctacctaactcaaacaacgtttgctgtgtgacgggctgctttttggcgatgtccgcatagccccaggtaaagtaataaggtttaccctgataaattaccgccaccgccatacccgggatcttttgttgctctataagcggggtaattgtgcgatgcacaatatcgttgatttgttgaggggcagcaaatgtggagcaagaggcggtaattaataaggcgcagagcgtcgttttgaacatagggtctggtttccatacaaaacggcccgccataggcgggccggatttacattggcgatgcgttagattgtaacgacaccaatcagcgtgacaactgtcaggatagcagccagaccgtagaaaacccatttgcccgcaggtacgtggattttcagatcgtgcatcgcgtggtgcatacggtgtaaaccacaccacagcggcagaacgatcatcaggaacaggaatacgcgaccaatgaagctctgcgcgaacgccagaacgcgctcgtagctcagcgcatcacccggaaacaaccccagtggcagcagaatacccaccagcaggatcatcaccggcgcaatgatggcgctccacataccaccggccccgaagaggccccagaataccggttcgtcagaacgctttggatttggattaatcatctcaggctccttaccagtacagggcaacaaacaggattacgatggtggcaaccacagttaccgcccagagacttttgataattggctctggtcccattttttcgtcttttacaatgatattggccgctttcggtgccagttcaaaccaggttttggtgtgcagcagagctgccgccagagtgatcaggttaatgatcacgataaccgggttttgtaaaaagtcgacgaatcccgcccaggcttccgggccatttttcagggcaaacagcccgaaaatcagttcaatgctgaaccacacagccggaaccgccgtgccttcgcgcagcatgtaaaagcgataaaacggcaattttttccaccaggtggacgtcattggccgtacatacggtttacgtttagtcgtcatgttgcactccttagcgtggtttcagggtcgcgataagaaagtctttgctactttctactttgccctgctgaatggccgcagccggatcgacgtgtttcgggcagacttcggagcagtagcccacgaaagtacagctccatacgccgttctggctgttcaactgcgccatacgctccttcttaccgtggtcgcggctatcttcgttataacgatgcgccagcgtaatggcagccggaccgatgaactctgggttcaggccaaactgcgggcacgcggcgtagcacaaaccacagttgatgcaaccggagaactggtgatacttcgccatctgcgccggggtctggatgttagtaccctgatccgcggtgcgggagttgccgatgatgtacggtttgatcgcttccagactttcgatgaagtgggtcatatcgaccaccagatcgcgttcaatcgggaagttagctaacgcttcaaccttcataccgtcggtgtaatcacgcaggaaggttttacatgccagttttggcacgttgttaaccatcatgccgcaggaaccacaaatcgccatacggcaggaccagcggtagctcaggtccggtgccaggttgtctttgatgtagcccagcgcatccagtaaactggtagttgcgtcataaggcacttcatagaatgcgctatgcggtgcggtatcgacttccgggttatagcgcaccacctcaattttcaggtttttcatctcagccattcgccttctccttcttattggctgcttccgccttatcggctgcatccgcttcgccaccgtaaacgcgtttagctggcggcagcgtagtaatcttcacgtcgctgtactccaggcgagtcgtgccatcagcatcgcggaaggcgagggtgtgtttgaggaagttgacgtcgtcacgctcggtgcaaccttcgtccagacgctggtgcgcgccgcgggactctttacgtgccattgcggagtgcgccatacattcagcaacgttcagaccgtggcccagttcaatggtgtagagcaggtcggtgttgaacacgctggaagtgtcggtgatgcgcacgcgcttgaagcgttcctgcagctctgccagcttgtcgatggttttctgcatcagttccggcgtacggtagataccgcagccttcttccatagccaggcccatttcgtcgcggatcttcgcccagttttcgccgccatcctggttaaccagatctttcagacgttgttcaacgccagctgcctgcgcttcaattgccgcttcgttgccattaccggcagttgctgcacgctctgtcgcttgttcaccggccagacggccgaagaccaccagttccgccagggagttagaacccagacggtttgcaccgtgcagaccaacagaggaacattcacccacggcgaacagacctttaatgcgggtttcacagttctgatcggtttcgataccgcccatggtgtagtgtgcggtcggacgtaccggaatcggttctttaaccggatcgacgccaacgtacgctttcgccagttcgcagatgaacggcagacgttcatgcagttttttctcgccgaggtgacgcaagtcgagataaaccacatcgccacgcggcgtggagatggtgttgcctttacgccattcgtgccagaaggcctgagagactttgtcgcgtggacccagttccatatatttgtttttcggctcgcccagcggagtttccgggcccatgccgtaatcttgcagataacggtagccatttttgttgaccagaataccgccttcaccgcggcaaccttcggtcatcaggataccggaacctggcagaccggttgggtgatactgaacgaattccatgtcacgcagcggaacgccgtggcttagcgccatacccataccgtcaccggtaacgatgccgccgttggtgttgtaacgataaacgcgacccgcaccgccagtagccataacgaccgcgttagcacggatctgcaccagcgtgccttccatcatgttcattgctaccaggccgcgaacatgaccatcatcaaccagaatatccagcacgaaatgttcgtcaaaacgctggatctgcgggaattgcagagaggtctggaacagcgtgtgcagcatatggaagccggtcttatcggcggcgaaccaggtgcgctcgattttcatgccgccgaagcgacgtacgttgacgctaccatccgggcgacggctccatgggcatccccacagttccagttgggtcatttcggttgggcagtggtggacgaaataatccacgacatcctgctcacacaaccagtcgccacccgctactgtatcgtgaaagtgatattcgaagctgtcatgatcctgcgcgacagcggcggagcccccttctgcagcaacggtatggctacgcatcgggtatactttactgattagtgcgatttttgcattcggatttgcctgcgcggcagcaattgcagcacgtaatcccgcgccaccggcgcctacaatggcaagatcggcttgaaaggtttgcacgacattcctccagattgtttttatcccacagccacgtacttcagggtaagtacctgaaagttacggtctgcgaacgctattccactgctcctttataggtacaacagtatagtctgatggataagtctgaaatttgacgagatcgatttttttagtgcgcaagagggctaaattatcactgaagatgattaatttaattactaaaccatcagatcgtgctttttttagtcactgcccaccgctgtttgattcctgcgtaaaatttgtctcgccgtcgcgttgcgagtagacttcgtgcccttgtcaaaaactggagatttaactatgagcgaaacggcatcctggcagccgagcgcatccattcctaacttattaaaacgcgcggcgattatggcggagatccgtcgtttctttgccgatcgtggagtgctggaggtggagacgccttgtatgagccaggcgacggtaaccgatattcatttggtcccgtttgagacacgtttcgttggccccgggcatagccaggggatgaatctctggttaatgaccagcccggaataccatatgaaacgcctgctggttgccggttgtgggccggtattccagctgtgccgcagcttccgtaatgaagagatggggcgttatcacaaccctgagttcactatgctggagtggtatcgaccgcactatgatatgtaccggttgatgaacgaggtggacgatctcttacaacaggtgctggactgcccggcagcagaaagcctttcttatcaacaagctttcttgcgttatctggaaattgacccgctctctgccgacaaaacgcaactgcgggaagtcgcagcgaaactggatttgagcaatgttgctgataccgaagaagaccgcgacacgctgctacaattgctgtttacctttggcgtagagccaaatattggcaaagaaaaaccgacctttgtgtaccactttccagccagccaggcaagtctggcgcaaatcagtaccgaagatcatcgggtcgctgaacgctttgaggtttattataaaggtattgagctggcgaatggtttccatgaattgacggatgcccgtgagcagcaacaacgctttgaacaagataaccgtaagcgcgcggcgcgcggtttgccgcagcaccccattgaccagaatctgattgaagccttgaaagtcggtatgcctgactgttccggcgtggcattaggtgttgatcgtctggtgatgttggcgctgggcgcggagacactggctgaagtcatcgcctttagcgttgaccgggcataattctgaaaaattactgaattaacagcgaagaatggcgtgataagcgccattctgtagcatatgttttcatttttccgttaaaggccacaatttaagactggatatttgatatcatccaggtatcaattctgtattggtttttacgctgcctgctcaatgttgcgcagtgcagttcagtgggcacgtgttatacacgcgctgaaatgaaggatggtttcatgcctcacacgataaaaaagatgagtctgataggactcatattgatgatctttacttccgtatttggatttgccaatagcccaagcgcttattacttaatgggttatagtgcgattcccttttatatattttctgcattgttattctttattccattcgccttaatgatggctgaaatgggagctgcttatcgcaaagaagaaggcggtatctattcctggatgaataatagtgtcggaccacgttttgccttcattggtacgtttatgtggttttcctcttatatcatctggatggtgagtacctccgcgaaagtttgggtaccgttcagtacattcctctatggtagcgacatgacccagcactggcgtattgccggactggagcctacgcaggtggttggtctgctggctgtggcatggatgattctggtcaccgtcgttgcttctaaggggattaataaaattgcccgcattactgcggtgggcggtattgcagtaatgtgtctgaatttagtattgctgttagtaagcattactattttgttattaaatggtgggcatttcgcgcaggatattaatttccttgcaagtccgaacccgggttatcagtccggtctggcaatgctaagctttgtggtatttgccatttttgcctatggcggaattgaagcggttggtggtctggtcgataaaacggaaaatccagaaaagaactttgccaaaggtattgtttttgccgctattgttattagtatcggttatagcctggcaatatttttatggggcgtcagcacaaactggcagcaggtattaagtaatggttccgttaacctcggcaatattacctatgtgctgatgaagagccttgggatgacgctgggtaatgcactgcatttgagtcctgaagcgagtttgagcctgggcgtatggtttgcgcgtattactggacttagcatgttcctcgcctataccggtgcgttctttacgctttgctatagtccgttgaaagccatcatccaggggacgccgaaagcattgtggccggaaccgatgacgcgcctgaatgcgatggggatgccgtctatcgccatgtggatgcagtgcgggttggttactgtcttcatcctgctggttagctttggtggcggtaccgcaagcgcgttctttaacaagctgacgctgatggcgaacgtgtctatgacgcttccttacctgttcctcgcgctggctttcccgttctttaaagcacgtcaggatctcgacagaccgtttgtgattttcaaaacgcatttgagcgcaatgattgcgacagtggttgtcgtactggtggtgacatttgcgaacgtcttcaccatcattcaacctgtggttgaagccggagactgggacagcacattgtggatgattggcggccctgtcttcttcagcctgttagcgatggcgatttaccagaactattgcagcagagtggcaaaaaatccgcagtgggcggtggaataacccgatgccctatcgtctacctgacgatagggcgtaaagacaggaaatgttatggatgacaccagccgggacccggcaataaccgaagatgaaatcagggcgctgcaattttctgccggggatgtagcggaaatagagcagacgattctctcttttgtcgatgcctgccacacccgtaaagtggcgatggtggtgggtagcaccattaacaccctcaaagatcgcgatggtaaacggtggggaaacctgccggatatttattgcgcttatcttatccgatgtctggtttttcgcggggaattagtgggatacggcgatttgtttcgtatgcgctatagcgaaattaagcgaccggttaccttatgagtgcgcgcatgtttgtcttatgctgcatctggtttattgtggcgttcctctggataaccatcacttccgcgctggacaaagagtggatgattgatggacgcgggattaacaacgtctgcgatgtgttgatgtatctcgaagaagacgatacccgtgatgttggtgtgataatgacgttaccgctctttttcccttttctctggttcgctttgtggcgaaaaaaacgcggctggtttatgtacgccaccgcgctggctattttcggctactggctgtggcagttttttctgcgctatcagttttgtttgtgagccggattggttcatccggcacacaaacttacaaacttcccgcctgacgacctttgcccgcagacgtcagcgttctccccgtttgtttaccgttgaggctttccagacgcatctggaagggcgggaatggcatatcgataccgtgggcatggaagccagccagaatcagctggtggatctcatggcgtagcggcatacggtgacccatctcagcggcgtaaatacgcagctcgaaaatctgaatcccctgttgcagatccaccaggaagacttccggtgccgggttgtcgatcaccaggctgcagcgacgcgctgcggtgagcaggatttccgtcacttcttcgctattggcatcggcaggggccggtatcgtcaacaccacgcgcgtgacgctgtcagagaggctccagttgataaactgctcggtaataaacgccttgttcggcacgattatctctttacggtcccagtcgctgatggtggtggcgcgggtgttaattttcgtcacgctaccggtgagatcgcgaattgtcaccgtatcgccaatgcgaatcggtttttcgaacaggataatcagaccagagataaagttggcgaaaatttcctgcaaaccaaaaccgagaccaacaccgagcgcggcaaccagccactgcaatttgctccactcaataccaatcatactgaagccgaccagcccgccaatcagcatcagcagatatttggtgatggtggtgatggcgtaacccgtacccggcgttaaatccaggtgctgcaaaatcgccagttccagcagcgcgggcaagttgcgcaccagctgcgtggtgatgataaacaccagaatggcaatcagcaccgcaccgagggtaattggctccagactttctacgccctgtaccgtggaggtgacatcccacaggctaatattttcgaggaagccgaaagcggaatggatttcactccacagcacaatgacagaaagcagggcgatcaacatcaaaatactgcgcaccagccgcaaggattgcgcactgatggcatcgagatcgacttcgctttcatcgacttcaattgctccttccgggctactgtgatgatgcgcttcctcttcgccacgcgcacgttgcgctaacatctctgcccggcgatgcttcgcccgatcaaacgccagcctgcggcgctggatcagcatccagcggcggataacgtgataaaccaccagtagcaggaaccagatggcaacgctggtttcaagcctcgctaacagcgcctgtgccgttgccagataacccaccgcgctcgccagaatggcaaccaacggcgcgccaatcatcatgttccacagcatatggttggtaatgttgtcgccgctgccctctttgttgagatacagcggaatcccggcctttttcaggctgagggtgaccaccgccagcgcaccgcaaatgaggataaagcaaagccgtcccaggctaccggagaattcacggtcgtcgaggttatcgaacatcatcagcgccataatcagcggcacaataagcccgatgctcatcaggtagtagcgcatcccacgggaaacacgttcgcgcggccagccaaaatgagcgataaacaagccgttcgggcgggcaaaggtggcgcaaatcatcactacccacagcagcggcacggtggccgttacaccatcgccaatcgcgaccgccagcggataaggccacgcctcgcgcaagccgtaacccagcgtcatccacagcaccggtaacggactcgcgacgagaatgctccagaaaagagtgcgcaacgtcagccagaagtgatcctgagtcactttgccaactttcgccgcgctacgttcaagaaaacgggtgaaatagcggcggctgtaaatactgcaaccgaccagaatcaacgcgccaaacagcggcaaaattgtctctttgctggtcagcatcatcacactggctttgcccaactgactgaaggtgtccaggctaatgagacgacgcagatcctgggcgatttccagcggccaggcgatggtcatcgggcgcacgtcagaggtccagaacagatagcggtgcgttgcttcgttcacctctttcagcgcatcctccagttgcccgttggagactttcagcttggtcagttccaatagtagcgtgtcgccaccctgcaacaaactgttcagcaactcacgctgagtgcgcagttgtgcttccagaatacggttttgctcggcagtcagcggctgaccgtcggcctgatgaatttgccgtagcagcggctgtttattaagcagatcctcataacgtaaccgttgcacacgcaactgcgccatttcggtatcaagctgttgtggtttcggcatttccggcagccgtgccacctgcgcccgcagcgcttcgccgagcagattggagcttcccagccattggctctgttcacgcagcgtattcaacgcctgccggacctgtaacgtctggctggcagcctgacgctgttggctggcaacgagatccatccgctgcgcctgttgattcaaagccgcgcttagttcgcggttaattttgaattgcgcgacgatatctttcggcaaatcggcgctgttttctgccagcaattcggtactttccagcgcccgctccgcctcaagctgacgttggctgtttaattgattacgcaaggcctgcaaatacgcatccagttgctggctctctttttccgccagctcactgcgtaagcgcgctaattcctggcggttattggcagacagctgcgccagctccagttcatcaacgagcgccttaagacgtgcagagtcagactgcaacgcgaaattttgtgcctgattgagcggagtattgccggtaagcgttcccaggcggcgctcgatctcatttaactgacggcgggcgtcggtttgctgttgcggcagttgattcaggctatcggcaatctcgcgggcgcgctcctgctcttgctgggcctgacggcttttatccagcaactggctgctgacctggagaatttcctgattcagcgcgtcggtagacattcccgggctcacgctgcgcggctcgtcacgcatgttgtttaattgtgcgcgcagagtagcggagagtttcggataattatcgataacttgctgatattgtttgatgcgctcaagggaaccttttcgttcctcaagcgcatttaaggcagactggagcgcctctacgacttccggctgtgcgggtttcgccgcttttgcctgctccagttcctgagtgatttgtttgctatcgggggccgtcgcggcgtacgccccccaactgaggcaccaggccatcagaaaagtgataatcaggcgcacgtcagcgtttcctttgatggattagacctggtcttttttgtcgtcaaccaatgggctggcgtcgtgttctgcttcgatctcttcagcaggaagcggggcaggttcagcgtctggcgtaacaaaggtttcggtagatactgccagcggctggccaattttcgtgacagacaggctttccagttgctcaaccagattcactttacccggtgcaaacaggttgataacggtggaaccgagtttaaagcgacccatttcctggcctttcagcagtgccacagaaccgtcgttttccccggcaggccaggtccagcgcttgatgataccttcgcgcggcggcgtaatggtgcccgcccagaccgtctcaatgctgccaacaatcgtcgctccgaccagaatctgcgccattgggccaaattcggtatcgaaaaggcaaatcacgcgttcgttacgggcaaacagattcggcacgttctgagccgtgagatggttaacggagaagagatcgcccggcacgtagatcatctcacgcagaataccgttgcacggcatgtgtacgcggtggtagtcacgcggggagaggtaagtggtcacaaacgtaccgttgcggaacaggtccgccatcagatagttgcctgccagcagggcttcgaggctgtagttgtggcctttggcttgcaggattttatcttcttcgattttacccaactggctgataacgccatcggcaggcatgaccagtacattcggatcggtatcgattgggcgtacttcgtcacgcagcggacggacaaagaattcgttaaaggtgcggtagctggcggtgtccggcttttgcgcctctttcatgtcgaccttgtagtatttaacgaacagatcgataaccagttttgtcagccatcctgcccgcttgcttgcgccccaacccgccaggcgagtaagccatagtttcggcagaatgtactgtaggctaagtttaaaactatttaacaaggtagcctccaggccattgttttgtcgttcctgatccggcctacatgccggatcctgaaaaaaaggggacgattctaacgacggttagcttaattgtcagtcatccgtatcagaaaagtttttacgcgtttttacctgcgccatgctttccagaatacggtgatagttttcgaaacgggtttccgcgattttcccttcctcaaccgcttcccggatagcgcagcccggatcggtatcgtgtttgcaatcgcgatatttacacagacctaaatagtcatggaattcgacaaagccctgagtgatttgttccggctccaggtgccagaggccgaactcacgcactcctggggagtcaatcacatcaccgccgtgcgggaagtgatacagccgagcggcggtcgtggtgtgctgaccgagcccgctgttgtcagagatatcgttggtcaggatctctttttgcagccccagcaacgcattcagcaggctggatttgccgacgccagactgcccggcaaaaatgctgatgcgcccggtcaacgcctcttccagcggttttagcccatcctgagtatggctggaaaccatcaatacgcgataaccgatattgcggtagatatccatctgctcgttgacgaacgccatgccttcgtcgtccagcaggtctatcttgttgagcacaataatcggctcaatctgcaaggtttcgcaggccaccaggtaacggtcgataatattgaggctcagctccggcaaaatggcggagacaatgacaatctggtcgatgttggcggcaataggttttacgccgtcgtagaaatccggacgcgtcaacacgctggtacgctcatgcaccgcttccacgatccctttgacatttacgccttccgccgccggtttacccggacgccagactacgcggtcgccggttaccaggctacggatggtacggcgaatattgcagcggtgaacgtcgccatcggcggattccacatcagcgtgcataccaaagcggctgatgacgataccttcatcaggctcgccaaacagattgtcgtcgtagtcgggcttctccttagacgttttaagacgacgctggtgattggcgttcacgcggcgctgctggcctttggagagtttatttttactcaatcgtacagactcctggtcgcccctgatgggcaaaacatctatgatacacgcaattgtggatcaatatagtcactgtgaatgggtggaaaatagcatgagtgccaatgaaaacaacctgatttggatcgatcttgagatgaccggtctggatcccgagcgcgatcgcattattgagattgccacgctggtgaccgatgccaacctgaatattctggcagaagggccgaccattgcagtacaccagtctgatgaacagctggcgctgatggatgactggaacgtgcgcacccataccgccagcgggctggtagagcgcgtgaaagcgagcacgatgggcgatcgggaagctgaactggcaacgctcgaatttttaaaacagtgggtgcctgcgggaaaaagcccgatttgcggtaacagcatcggtcaggaccgtcgtttcctgtttaaatacatgccggagctggaagcctacttccactaccgttatctcgatgtcagcaccctgaaagagctggcgcgccgctggaagccggaaattctggatggttttaccaagcaggggacgcatcaggcgatggatgatatccgtgaaagcgtggcggagctggcttactaccgcgagcattttatcaagctgtaaaatttttcctggtcacgtaagcgccggaatccacttgcggcggcgtgattttgacgctaaattgaacgtcttgctgataatttcagcacttgagataaaaacgcaaaaaaaacttttttggggggttgcagagggaaagatttctcgtataatgcgcctcccgtaacgacgcagaaatgcgaaaattacgaaagcaaaattaagtagtacgcgggaatagctcagttggtagagcacgaccttgccaaggtcggggtcgcgagttcgagtctcgtttcccgctccaaaatttgaaaagtgctgcaaagcacagaccacccaagcgggaatagctcagttggtagagcacgaccttgccaaggtcggggtcgcgagttcgagtctcgtttcccgctccaaaatttgaaagtgctgtaaggcacagaccacccaagcgggaatagctcagttggtagagcacgaccttgccaaggtcggggtcgcgagttcgagtctcgtttcccgctccaaattcttctctcaataaaatatccacagcgacgcgatgcgttattgctggtttttgttgtctctgacaaactcttgtaaacagagttatccacagcctcaggctgtaatcttaatttcaaagaaacttcgcacggtgaatagtatttttttaacctattgatagataagttaaaaattaagattccgttttgtcgagtcgatcacttgacgattttattcgtcttgaattgcaatgcgtttttatttttattcacaagctgtggatgaatcaggcgtcacgcggtaaccctttttcaatcacccgaaccagacgctgttttttcggcaattgcacttcgactatgcacgcatttcgtctctctatttgctgcgcaatcgcccacgctatgtgctcatcgagaagtgggtgctcacctttacgactttccagcgctgtcaaaatcgtttcatcccaaggggcattgcctaatgctacggcgatattacgcagccaacgcaggtgaccaatacgacgaatcgcgcttccttccgtgacttttaaaaacttctcttcgctccaggcgaataactcaatgagttccggtgcgtgtagcggcttacgcgggctgaaatcctcttctgtggtgagttgactatagcgattccacgggcagataagctggcagtcatcgcaaccgtaaatacggtttcccattaacggtcgcaactcttccgggatcgccccttcaagttcgatggtgagataagagatacagcggcgagcatcgacggtatatggctcgacgatggcaccggtcgggcaaatcgtcatacaggccacgcatttgccgcatccttcctcgactggttgatccacgggcagcggaatatcgaccagcaattcgcctaaaaagaagaagctaccggcctcgcgattgaggataagactgtgcttacctgtccagccgagcccagctttttcagctaacgggcgctcgagaataggcgcagaatcgacaaacggtctaaaattcaggctaacacaatgttgctgaatcatctcgcccagctttttgagtcggttgcgcagaagtttgtgatagtcacggcccagcgcataacggctaacatagccgagtttggggtttttcagcgtgctggcaaatgcggcgttagcaggaaggtaattcatccgcacgctgatcacgcgcagcgtaccgggcaataactcatgagggcgagcgcgcagcataccgtgacgtgccatccagtccatttcgccgtggtattgtttgtccagccatgcttgcagtttgggctcggactcgctgagatcggtatcggtaatacctacctgctgaaagcccagttccagcccccactgtttaattttttgcgctaactgattgagatcgaggggctcactcatgacggaccatacaatgaagaaaaaccccgtaagtataccacacaccgtctggtacgccgacgatatccgccgcggagaacgcgaggcggcagatgtgctggggctcacactctatgagctgatgcttcgcgctggcgaggccgcattccaggtgtgtcgtagcgcgtatcctgacgcccgccactggctggtgctgtgcggtcatggtaataacggcggcgatggctacgtggtcgcgcgactggccaaagcggtcggcattgaggtcacgttgttggcccaggagagcgacaaaccgttgccggaagaggccgcgctggcacgcgaagcatggttaaacgcgggtggcgagatccatgctagcaatattgtctggcccgaaagcgtagatctgattgttgatgcgctgctcggtaccggtttgcggcaagcgccccgcgaatccattagccagttaatcgaccacgctaattcccatcctgcgccgattgtggcggttgatatcccttccggcctgctggctgaaactggcgctacgccaggcgcggtgatcaacgccgatcacaccatcacttttattgcgctgaaaccaggcttgctcactggaaaagcgcgggatgttaccggacaactgcattttgacagtctggggctggatagttggctggcaggtcaggagacgaaaattcagcggtttagtgcagaacaactttctcactggctaaaaccgcgtcgcccgactagccataaaggcgatcacgggcggctggtaattatcggtggcgatcacggcacggcgggggctattcgtatgacgggggaagcggcgctgcgtgctggtgctggtttagtccgagtactgacccgcagtgaaaacattgcgccgctgctgactgcacgaccggaattgatggtgcatgaactgacgatggactctcttaccgaaagcctggaatgggccgatgtggtggtgattggtcccggtctgggccagcaagagtgggggaaaaaagcactgcaaaaagttgagaattttcgcaaaccgatgttgtgggatgccgatgcattgaacctgctggcaatcaatcccgataagcgtcacaatcgcgtgatcacgccgcatcctggcgaggccgcacggttgttaggctgttccgtcgctgaaattgaaagtgaccgcttacattgcgccaaacgtctggtacaacgttatggcggcgtagcggtgctgaaaggtgccggaaccgtggtcgccgcccatcctgacgctttaggcattattgatgccggaaatgcaggcatggcgagcggcggcatgggcgatgtgctctctggtattattggcgcattgcttgggcaaaaactgagcccgtatgatgcagcctgtgcaggctgtgtcgcgcacggtgcggcagctgacgtactggcggcgcgttttggaacgcgcgggatgctggcaaccgatctcttttccacgctacagcgtattgttaacccggaagtgactgataaaaaccatgatgaaagcagtaattccgctccctgaataaggaagtgactgataaaaaccatgatgaatcgagtaattccgctccctgatgagcaggcaacattagacctgggcgagcgggtagcgaaagcctgcgatggcgcaaccgtaatctatctgtatggcgatttaggcgcaggtaaaaccacctttagccggggctttttacaggctctgggtcatcagggtaatgtcaaaagccccacttatacgctggtcgaaccctatacgctcgacaacttaatggtctatcactttgatttgtaccgccttgccgatcccgaggagctggagtttatggggatccgcgattattttgccaacgatgccatctgcctggtggagtggccacaacaaggtacaggtgttcttcctgacccggatgtcgaaatacacattgattatcaggcacaaggccgtgaggcgcgcgtgagtgcggtttcctctgcgggtgaattgttgctggcgcgtttagccggttaacctttgaaaggtggcgggatgatgtatcgcatcagaaattggttggtagcgacgctgctgctgctgtgcacgccggtgggtgccgcgacgctctctgatattcaggtttctaacggtaatcaacaggcgcggataacgttgagttttattggcgatcctgattatgcgtttagccatcaaagcaaacgcaccgtggcgctcgatatcaaacaaacgggcgtgattcagggactgccgttgttgttcagcggcaataatctggtgaaggcgattcgctctggaacgcctaaagatgcacaaacgctacggctggtggtcgatcttaccgaaaacggtaaaaccgaagcggtgaagcggcagaatggcagcaattacactgtcgtctttacgattaacgccgatgtgccgccaccgcctcctccgccgcccgtggttgcgaaacgcgttgaaacgcctgcggttgtcgcaccgcgcgtcagcgaaccggcgcgcaatccgtttaaaacggaaagtaaccgcactacgggtgttatcagcagtaatacggtaacgcgtccggcagcgcgcgcgacggctaacactggcgataaaattatcatcgctattgatgccggacacggcggtcaggaccctggcgctatcggccccggtggtacgcgggagaaaaatgtcaccatcgccatcgcgcgtaaattgcgtactttgctcaatgacgatccgatgtttaaaggcgttttaacccgtgacggggattactttatcagcgtgatggggcgcagtgatgtggcacgtaagcaaaacgccaatttcctcgtgagcattcacgctgatgccgcaccgaaccgcagtgcgactggcgcttccgtatgggtgctctctaaccgtcgcgccaacagtgaaatggccagctggctggagcagcacgagaaacagagcgagctgctgggtggggcgggtgatgtgctggcgaacagtcagtctgacccctatttaagccaggcggtgctggatttacagttcggtcattcccagcgggtagggtatgatgtagcgaccagtatgatcagtcagttgcaacgcattggcgaaatacataaacgtcgaccagaacacgccagccttggcgttctgcgcagcccggatatcccaagtgtactggtcgaaaccggttttatcagcaacaacagcgaagaacgtttgctggcgagcgacgattaccaacaacagctggcagaagccatttacaaaggcctgcgcaattacttccttgcgcatccgatgcaatctgcgccgcagggtgcaacggcacaaactgccagtacggtgacgacgccagatcgcacgctgccaaactaaggacgattgatgccaattcaggtcttaccgccacaactggcgaaccagattgccgcaggtgaggtggtcgagcgacctgcgagcgtagtcaaagaactagtggaaaacagcctcgatgcaggtgcgacgcgtatcgatattgatatcgaacgcggtggggcgaaacttatccgcattcgtgataacggctgcggtatcaaaaaagatgagctggcgctggcgctggctcgtcatgccaccagtaaaatcgcctctctggacgatctcgaagccattatcagcctgggctttcgcggtgaggcgctggcgagtatcagtagcgtttcccgcctgacgctcactagtcgcaccgcagaacagcaggaagcctggcaggcctatgccgaagggcgcgatatgaacgtgacggtaaaaccggcggcgcatcctgtggggacgacgctggaggtgctggatctgttctacaacaccccggcgcggcgcaaattcctgcgcaccgagaaaaccgaatttaaccacattgatgagatcatccgccgcattgcgctggcgcgtttcgacgtcacgatcaacctgagccataacggtaaaattgtgcgtcagtaccgcgcagtgccggaaggcgggcaaaaagaacggcgcttaggcgcgatttgcggcaccgcttttcttgaacaagcgctggcgattgaatggcaacacggcgatctcacgctacgcggctgggtggccgatccaaatcacaccacgcccgcactggcagaaattcagtattgctacgtgaacggtcgcatgatgcgcgatcgcctgatcaatcacgcgatccgccaggcctgcgaagacaaactgggggccgatcagcaaccggcatttgtgttgtatctggagatcgacccacatcaggtggacgtcaacgtgcaccccgccaaacacgaagtgcgtttccatcagagccgtctggtgcatgattttatctatcagggcgtgctgagcgtgctacaacagcaactggaaacgccgctaccgctggacgatgaaccccaacctgcaccgcgttccattccggaaaaccgcgtggcggcggggcgcaatcactttgcagaaccggcagctcgtgagccggtagctccgcgctacactcctgcgccagcaagtggcagtcgtccggctgccccctggccgaatgcgcagccaggctaccagaaacagcaaggtgaagtgtatcgccagcttttgcaaacgcccgcgccgatgcaaaaattaaaagcgccggaaccgcaggaacctgcacttgcggcgaacagtcagagttttggtcgggtactgactatcgtccattccgactgtgcgttgctggagcgcgacggcaacattagtcttttatccttgccagtggcagaacgttggctgcgtcaggcacaattgacgccgggtgaagcgcccgtttgcgcccagccgctgctgattccgttgcggctaaaagtttctgccgaagaaaaaagcgcattagaaaaagcgcagtctgccctggcggaattgggtattgatttccagagtgatgcacagcatgtgaccatcagggcagtgcctttacccttacgccaacaaaatttacaaatcttgattcctgaactgataggctacctggcgaagcagtccgtattcgaacctggcaatattgcgcagtggattgcacgaaatctgatgagcgaacatgcgcagtggagtatggcacaggccataaccctgctggcggacgtggaacggttatgtccgcaacttgtgaaaacgccgccgggtggtctgttacaatctgttgatttacatccggcgataaaagccctgaaagatgagtgatatcagtaaggcgagcctgcctaaggcgatttttttgatggggccgacggcctccggtaaaacggcgttagccattgagctgcgtaaaattttaccagtagagttgataagcgttgattctgcccttatttacaaagggatggatatcgggacggcgaagccgaacgctgaagagttactcgccgcgccgcaccgattgctggatattcgcgatccgagccaggcttacagcgctgctgattttcgccgcgatgcgctggcggaaatggccgatatcaccgcggcggggcggatcccactgttagtgggcggtacgatgttgtatttcaaggcattgctggaagggttgagcccgctaccgagcgcagacccggaagtacgggccagaattgagcaacaggcggcagagcaaggttgggagagtttgcatcgtcaacttcaggaggtagatccggttgcggcagcaaggattcatccaaatgatccacaaaggctttcccgggcactggaagtttttttcattagcggtaaaactttaacggaactgacgcaaacgagtggagacgctctaccgtatcaggtgcatcagttcgccatcgccccggcgagccgtgaactgctccatcaacgcattgagcagcgttttcatcagatgttggctagtggttttgaagcagaagtccgggcgctttttgcccgaggagatttgcatacggacttgccttccattcgttgcgtgggttatcgccagatgtggtcttaccttgaaggcgaaatcagttacgatgaaatggtttatcgaggtgtttgcgccacgagacagttggcgaagcggcagataacctggctgcgtggttgggaaggggttcactggcttgacagtgaaaaaccagaacaggcgcgtgacgaagtattacaggttgttggtgctatcgcaggctgaatgtgtacaattgagacgtatcgtgcgcaattttttcagaatcgaaaggttcaaagtacaaataagcatataaggaaaagagagaatggctaaggggcaatctttacaagatccgttcctgaacgcactgcgtcgggaacgtgttccagtttctatttatttggtgaatggtattaagctgcaagggcaaatcgagtcttttgatcagttcgtgatcctgttgaaaaacacggtcagccagatggtttacaagcacgcgatttctactgttgtcccgtctcgcccggtttctcatcacagtaacaacgccggtggcggtaccagcagtaactaccatcatggtagcagcgcgcagaatacttccgcgcaacaggacagcgaagaaaccgaataaggtttcgggctgtttttttacacggggagccagcgatcctgcgttccccgctgatctatttagagggttatacgcttgtttgaccgttatgatgctggtgagcaggcggtactggtacacatctattttacgcaagacaaagatatggaagacctccaggagtttgaatctctggtctcttccgccggtgtcgaagcattgcaggtgattaccggtagccgtaaagcgccgcacccaaagtattttgtaggtgaaggtaaagcagttgaaattgcggaagctgtcaaagcgacgggtgctagcgtcgttctttttgaccatgccctgagcccggcgcaagagcgtaacctggagcgtttgtgcgagtgtcgtgttatcgaccgcaccggccttattttagatattttcgcccaacgtgcgcgtacccatgagggtaagttgcaggttgagctggcgcagctgcgccatctggctacgcgcctggtgcgtggctggacccaccttgaaagacagaaaggcgggataggtttgcgtggtccgggtgaaacccagctcgaaaccgaccgtcgtttgttgcgtaatcgcatcgtgcagatacagagccgcctggaaagagttgaaaagcagcgtgagcaggggcggcaaagccgtatcaaagccgacgttcctactgttagcctggtgggatataccaacgccggtaaatctacccttttcaatcgcatcaccgaagcgcgggtctacgcggcagaccagttgtttgccaccctcgacccgacgttgcggcgtattgacgttgcagatgtcggtgaaaccgtacttgcagataccgtagggtttattcgccacctgccgcacgatctggtggcggcatttaaagccacgttacaagagacgcggcaagccacattactgctgcacgtcattgatgcggcggatgtgcgtgtacaagaaaacatcgaagcggtgaatacggttcttgaagagatcgacgctcacgagatcccaaccctgctggtgatgaacaagatcgatatgctggaagatttcgaaccgcgtattgatcgggacgaagagaacaaaccgaaccgtgtctggctttccgcacagaccggagcggggataccacagctttttcaggctttgacggagcggctttccggcgaggtggcgcagcatacattgcgtctgccaccgcaggaagggcgtctgagaagtcgtttttatcagcttcaggcaatagaaaaagagtggatggaggaggacggcagcgtaagtctgcaagttcgtatgccgatcgttgactggcgtcgcctctgtaaacaagaaccggcgttgatcgattacctgatctaacggcgtagcgtctgaagcgtggagtcatatcctctggcgtcgaaagacaacagggatcaccgcataacaaatatggagcacaaacatggcgtggaatcagcccggtaataacggacaagaccgcgacccgtggggaagcagcaaacctggcggcaactctgagggaaatggaaacaaaggcggtcgcgatcaagggccacctgatttagatgatatcttccgcaaactgagcaaaaagctcggtggtctgggcggcggtaaaggcaccggatctggcggtggcagtagtagccaaggcccgcgcccgcagcttggcggtcgtgtcgttaccatcgcagcggcagcgattgtcattatctgggcggccagtggtttctataccattaaagaagccgaacgcggcgtggtaacacgctttggtaaattcagccatctggttgagccgggtctgaactggaaaccgacgtttatcgacgaagtcaaaccggtgaacgtggaagccgtgcgtgaactggccgcttctggtgtgatgctgacgagcgacgagaacgtagtgcgcgttgagatgaacgtgcagtaccgcgtcaccaatccggaaaaatatctgtatagcgtgaccagcccggatgacagcctgcgtcaggctaccgacagcgccctgcgtggagttatcggtaaatacaccatggaccgcattctgacggaaggtcgtaccgtgattcgtagcgatactcagcgcgaactggaagagacgattcgtccgtatgacatgggtatcacgctgctggacgtcaacttccaggctgctcgtccgccggaagaagtaaaagcggcgtttgacgatgcgattgccgcgcgtgaaaacgaacagcaatacattcgtgaagcagaagcgtataccaacgaagttcagccgcgtgcgaacggtcaggcgcaacgtatcctcgaagaggcgcgtgcgtacaaggcccagaccatcctggaagctcagggtgaagtggcgcgctttgctaaacttctgccggaatataaagccgcgccggaaattactcgcgagcgtctgtatatcgagacgatggaaaaagtgttgggtaacacccgcaaagtgctggttaacgataaaggtggcaacctgatggttctgccgttagaccagatgctgaaaggtggtaacgcccctgcggcgaagagcgataacggtgccagcaatctgctgcgtctgccgccagcctcttcctccacaaccagtggagcaagcaacacgagctccaccagtcagggcgatattatggaccaacgccgcgccaacgcgcagcgtaacgactaccagcgtcagggggaataacgatgcgtaagagtgttatcgcgattatcatcatcgtgctggtagtgctttacatgtctgtctttgtcgtcaaagaaggtgagcgcggtattacgctgcgttttggtaaggtactgcgtgacgatgacaacaaacctctggtttatgagccgggtctgcatttcaagataccgttcattgaaacggtgaaaatgctcgacgcacgtattcagaccatggacaaccaggccgaccgctttgtgaccaaagagaagaaagacctgatcgtcgactcttacatcaaatggcgcatcagcgatttcagccgttactacctggcaacgggtggtggcgacattagccaagcggaagtgctgttgaaacgtaagttctctgaccgtctgcgttctgaaattggtcgcctggacgtgaaagatatcgtcaccgattcccgtggtcgtctgaccctcgaagtacgtgacgcgctgaactccggttctgcgggtacagaagatgaagttactaccccggcggcagataacgccattgccgaagcggcagagcgcgtaacggctgagacgaagggcaaagttccggtcatcaacccgaacagtatggcggcgctgggtattgaagttgtcgatgtgcgtatcaagcagatcaacctgccgaccgaagtgtctgaagcgatctacaaccgtatgcgcgccgagcgtgaagcggtagcgcgtcgtcaccgtagtcaaggtcaggaagaagcggaaaaactgcgcgcgactgccgactatgaagtgaccagaacgctggcagaagctgagcgtcagggccgcatcatgcgtggtgaaggcgatgccgaagcagccaaactgtttgctgatgcattcagtaaagatccggacttctacgcattcatccgtagcctgcgtgcttatgagaacagcttctctggcaatcaggacgtgatggtcatgagcccggatagcgatttcttccgctacatgaagacgccgacttccgcaacgcgttaatataacgactgcggtacaggtcaataaagccaccgcatcctcagggatgtcggtggttttctttttctataaggataatgaatgaatagcacaatctggctggcgcttgccctggttttggtactggaaggtttagggccgatgctttacccgaaggcatggaagaagatgatctctgcgatgaccaatttgcccgataatattttacgtcgttttggcggtggacttgtggttgcgggcgttgtggtctactacatgttgaggaaaacgattggctgaacaaaaaacagactgatcgaggtcatttttgagtgcaaaaagtgctgtaactctgaaaaagcgatggtagaatccatttttaagcaaacggtgattttgaaaaatgggtaacaacgtcgtcgtactgggcacccaatggggtgacgaaggtaaaggtaagatcgtcgatcttctgactgaacgggctaaatatgttgtacgctaccagggcggtcacaacgcaggccatactctcgtaatcaacggtgaaaaaaccgttctccatcttattccaagtggtattctccgcgagaatgtaaccagcatcatcggtaacggtgttgtgctgtctccggccgcgctgatgaaagagatgaaagaactggaagaccgtggcatccccgttcgtgagcgtctgctgctgtctgaagcatgtccgctgatccttgattatcacgttgcgctggataacgcgcgtgagaaagcgcgtggcgcgaaagcgatcggcaccaccggtcgtggtatcgggcctgcttatgaagataaagtagcacgtcgcggtctgcgtgttggcgaccttttcgacaaagaaaccttcgctgaaaaactgaaagaagtgatggaatatcacaacttccagttggttaactactacaaagctgaagcggttgattaccagaaagttctggatgatacgatggctgttgccgacatcctgacttctatggtggttgacgtttctgacctgctcgaccaggcgcgtcagcgtggcgatttcgtcatgtttgaaggtgcgcagggtacgctgctggatatcgaccacggtacttatccgtacgtaacttcttccaacaccactgctggtggcgtggcgaccggttccggcctgggcccgcgttatgttgattacgttctgggtatcctcaaagcttactccactcgtgtaggtgcaggtccgttcccgaccgaactgtttgatgaaactggcgagttcctctgcaagcagggtaacgaattcggcgcaactacggggcgtcgtcgtcgtaccggctggctggacaccgttgccgttcgtcgtgcggtacagctgaactccctgtctggcttctgcctgactaaactggacgttctggatggcctgaaagaggttaaactctgcgtggcttaccgtatgccggatggtcgcgaagtgactaccactccgctggcagctgacgactggaaaggtgtagagccgatttacgaaaccatgccgggctggtctgaatccaccttcggcgtgaaagatcgtagcggcctgccgcaggcggcgctgaactatatcaagcgtattgaagagctgactggtgtgccgatcgatatcatctctaccggtccggatcgtactgaaaccatgattctgcgcgacccgttcgacgcgtaattctggtacgcctggcagatattttgcctgccgggcgaacagtgtgatacattgctgtgtcgggtaagccattacgctatccgacacagtgttaaatcctcgcttttttccttccccgaactgaaataaattagcgacacagcttgtggctggtttatcatcaatataaatgtattttttcccgatttcccttttgaggttgatgtgcagttaacgagtttcactgattacggattacgtgcgctgatctacatggcgagtttgccagaagggcggatgaccagtatttctgaagtgactgacgtctacggcgtctcccgtaatcatatggtcaaaataatcaatcaacttagtcgtgccggctacgtgactgctgttcgtggaaaaaatggcggcattcgcctgggtaaaccggcgagtgcgatacgtattggtgatgtggtgcgcgagctggagcccttaagcctggtgaattgcagcagtgagttttgccacattacacctgcctgtaggttgaaacaggcactttctaaggccgtgcaaagttttcttacggaactggataactacacgcttgccgatttggttgaagagaatcaaccgctttataaattattgctggtggagtgacgaaaatcttcatcagagatgacaacggaggaaccgagatgagtcaagatcctttccaggaacgcgaagctgaaaaatacgcgaatcccatccctagtcgggaatttatcctcgaacatttaaccaaacgtgaaaaaccggccagccgtgatgagctggcggtagaactgcacattgaaggcgaagagcagcttgaaggcctgcgtcgccgcctgcgcgcgatggagcgcgatggtcaactggtcttcactcgtcgtcagtgctatgcgctgccggaacgcctcgacctggtgaaaggtaccgttattggccaccgtgatggctacggctttctgcgggttgaagggcgtaaagatgatttgtatctctccagcgagcagatgaaaacctgcattcatggcgatcaggtgctggctcagccgctgggtgctgaccgtaaaggtcgtcgtgaagcgcgtattgtccgcgtactggtgccaaaaaccagccagattgttggtcgctactttaccgaagcgggcgtcggctttgtggttcctgacgacagccgtctgagcttcgatatcttaatcccgcccgatcagatcatgggcgcgcggatgggctttgtggtcgtagtcgaactgactcagcgtccgactcgccgcaccaaagcggtgggtaaaatcgtcgaagtgctgggcgacaatatgggcaccggcatggcggttgatatcgctctgcgtacccatgaaattccgtacatctggccgcaggctgttgagcaacaggttgccgggctgaaagaagaagtgccggaagaagcaaaagcgggccgtgttgatctgcgcgatttaccgctggtcaccattgatggcgaagacgcccgtgactttgacgatgcagtttactgcgagaaaaaacgcggcggcggctggcgtttatgggtcgcgattgccgacgtcagctactatgtgcgtccgagtacgccgctggacagagaagcgcgtaaccgtggcacgagcgtgtacttccctagccaggttatcccgatgctgccggaagtgctctctaacggcctgtgtagcctcaacccgcaggtagaccgcctgtgtatggtgtgcgagatgacggttagcagcaaaggccgcctgacgggctacaaattctacgaagcggtgatgagctctcacgcgcgtctgacctacaccaaagtctggcatattctgcagggcgatcaggatctgcgcgagcagtacgccccgctggttaagcatctcgaagagttgcataacctctataaagtgctggataaagcccgtgaagaacgcggtgggatcagttttgagagcgaagaagcgaagttcattttcaacgctgaacgccgtattgaacgtatcgaacagacccagcgtaacgacgcgcacaaattaattgaagagtgcatgattctggcgaatatcagcgcggcgcgtttcgttgagaaagcgaaagaaccggcactgttccgtattcacgacaagccgagcaccgaagcgattacctctttccgtagtgtgctggcggagctggggctggaactgccgggcggtaacaagccggaaccgcgtgactacgcggagctgctggagagcgttgccgatcgtcctgatgcagaaatgctgcaaaccatgctgctgcgcagcatgaaacaggcgatttacgatccagaaaaccgtggtcactttggcctggcattgcagtcctatgcgcactttactagcccgattcgtcgttatccagacctgacgctgcaccgcgccattaaatatctgctggcgaaagagcaggggcatcagggcaacaccactgaaaccggcggctaccattatagcatggaagagatgctgcaactgggtcagcactgtagcatggcggaacgtcgtgccgacgaagcaacgcgcgatgtggctgactggctgaagtgtgacttcatgctcgaccaggtaggtaacgtctttaaaggcgtaatttccagcgtcactggctttggcttcttcgtccgtctggacgacttgttcattgatggtctggtccatgtctctagcctggacaatgactactatcgctttgaccaggtagggcaacgcctgatgggggaatccagcggccagacttatcgcctgggcgatcgcgtggaagttcgcgtcgaagcggttaatatggacgagcgcaaaatcgactttagcctgatctccagcgaacgcgcaccgcgcaacgtcggtaaaacggcgcgcgagaaagcgaaaaaaggcgatgcaggtaaaaaaggcggcaagcgtcgtcaggtcggtaaaaaggtaaactttgagccagacagcgccttccgcggtgagaaaaaaacgaagccgaaagcggcgaagaaagacgcgagaaaagcgaaaaagccaagcgcgaaaacgcagaaaatagctgcagcgaccaaagcgaagcgtgcggcgaagaaaaaagtggcagagtgatcaataccctctttaaaagaagagggttagattgctgacaaaatgcgctttgttcatgccggatgcggcgtgaacgccttatccggcctacataatcacgcaaattcaatatattgcagagatcatgtaggccggataaacgtagtgcatcaggcaaaacgtaaacaacgagtacattaatgagcgaaatgatttacggcatccacgcagtgcaggccctgctggagcgcgcccctgaacgttttcaggaagtctttattttaaaaggccgtgaagataaacgtctgttaccgctgattcacgcccttgagtctcagggcgtggttatccagttggcaaaccgccaatatctcgacgagaaaagcgacggtgccgtgcatcagggcattatcgcccgcgtgaagccaggacgtcagtatcaggaaaacgatctgccggatctgatcgctagcctcgatcaaccgttcctgctgatcctcgacggcgtaaccgatccgcacaacctcggcgcgtgcctgcgtagtgcggacgccgcaggcgttcatgcggtgattgtgccgaaagatcgctccgcacagctcaacgctacggcgaaaaaagtagcctgcggcgcggcagaaagcgttccgctgattcgggtgactaaccttgcgcgcaccatgcgtatgttgcaggaagagaatatctggatcgtcggtacggcaggcgaggcggatcatacactctatcagagcaaaatgaccggacgcctggcgctggtgatgggtgcggaaggtgaaggtatgcgtcgcctgactcgtgaacattgcgatgagttgatcagcatcccgatggctggaagcgtttcttccctgaacgttagcgttgcgaccggaatttgcttatttgaagcggtgcgccagcgcagctaatttctcagaattatgaaaagccatccagatttggatggtttttttttgtctatagctggtaagataattacgtattgcaaatattcattttattaatatttaaacttaatctatatggaataatatatgacatggaatccgttggcgctagcgacggcgctgcaaactgtacctgaacaaaatattgatgtaacaaatagcgagaacgcattaattattaaaatgaatgattatggcgatttgcaaatcaatattctttttacttcccgccaaatgattatcgaaacctttatttgtccggtgagtagtatcagcaatccagatgaatttaataccttcttattaagaaatcagaagatgatgccgttgagtagcgtagggatctccagcgtacaacaggaagagtattacattgttttcggggcgttaagccttaaatcttctcttgaagatatcctgcttgagataaccagcctggtagataacgcattggatctggctgaaattacagaagaatatagtcactaattacaaggacgggtatttatgggaattttaaaaagtttatttacgctggggaaaagctttatctcccaggcggaagaatccattgaagaaacccagggcgtgcgcatgctggaacagcatattcgtgacgctaaagctgaactcgataaagccggaaaatctcgcgttgatctgctggcgcgggtgaaattaagtcacgataagctgaaagatttacgtgagcgcaaagccagtctggaagcccgtgcgctggaagcgttaagcaagaacgttaatccgagcttgattaacgaagttgctgaagaaatcgcgcgccttgagaatctcattaccgctgaagagcaagtgttgagcaatctggaagtctcccgtgatggcgtggaaaaagcagttacagcgacagcgcagcgtatcgctcagtttgagcagcaaatggaagtcgttaaagccactgaagccatgcagcgtgcacaacaggctgtaacaacctctaccgttggcgcatcttccagcgttagcacagcggcagaatccttaaaacgcctgcaaacgcgtcaggccgaacgtcaggctcgcctggatgctgccgcacagttggagaaagtcgcagacggtcgcgaccttgacgaaaagctggcggaagccggaattggcggtagcaataaaagtagcgcccaggatgtattagcaagactgcaacgccaacagggcgagtaatttttttgccagcctcgctaaaaggctggcaactattttaaggataaaatatgtctggttttttccagcgtctgtttggcaaggataataagccagctatcgctcgtggtccgctgggacttcatctcaatagtggctttacgctcgacacgttagcgtttcgtttgctggaagatgaattgctgattgcgctgccgggtgaggaatttacggtagccgccgtcagccacatcgatctgggcggcggtagtcagattttccgctactacactagtggcgatgagtttctgcaaatcaataccaccggcggcgaagatattgatgacattgatgatatcaagctctttgtctatgaagagagctacggtatcagtaaagagagtcactggcgcgaggcgatcaacgccaaagcgatgggagcaatgaccttaaactggcaggaaaaacgctggcagcgattttttaacagcgaagaaccgggaaatatcgaacccgtctacatgctggaaaaagtagaaaatcaaaaccatgccaaatgggaggtccataattttaccatgggctaccaacggcaagtaaccgaagatacttacgaatatttgctgctaaatggtgaggaatcttttaacgatctcggcgagccagagtggttatttagccgcgcgttgggtgtcgatatcccgctgacaagtcttcatattattggttaattacaaggacgtttacaatgcatatactggatagtcttcttgcctttagcgcctatttttttattggcgtggctatggtgattatttttctgtttatctattctaaaattacaccgcacaacgaatggcagttaatcaaaaacaataataccgcggcgagtctggcgttcagcggtacattgttgggttacgttatccccttatccagtgcggcaatcaatgcggtgagtattccagactatttcgcctggggcgggattgcactggtgattcagttactcgtttttgctggtgtcagactttatatgcccgcattaagcgaaaaaattattaatcacaataccgcagcaggaatgtttatgggaaccgccgcgctggctggcggtatttttaacgcagcttgtatgacatggtaatggacgatcatggccagaaaacgcaaaagtagaaataacagtaaaattggtcacggagcgattagtcgcattggtagaccgaataatccttttgaaccgtgccgcaatcgctacgcacaaaaatacttaacgttggcgctaatgggcggtgccgcttttttcgtattgaaaggttgtagcgatagtagcgatgtcgataacgacggcgacggaacgttttacgcgacagtgcaggattgtattgatgacggtaataatgccgacatttgcgcgcgtggctggaacaacgccaaaacggcattttatgccgatgttccgaagaatatgactcagcagaactgtcagtctaagtacgaaaattgctactacgacaatgttgaacagagttggatcccggtcgtttctggatttttgttaagccgggttattcgtaaagatcgcgatgagccgtttgtttataacagcggcggttcctcttttgctagccgcccagtctggcgcagcacttctggtgattactcctggcgctccggttctggcaaaaaagagtcttactctagcggcggctttaccaccaaaaaagcgtctaccgtttctcgcggcggctatggtcgttcttccagcgcccgtgggcattggggaggctaatcatgctgagacacaacgttcctgtgcgacgggatctggaccagatcgccgctgacaacggtttcgactttcatatcatcgacaatgaaatctattgggatgagagtcgggcttaccgttttactctgcgccagattgaagagcagatcgaaaaaccgactgcggaactgcatcagatgtgccttgaggtggtggatcgcgcggtaaaagatgaagagatcctgacgcaactggcgatcccgccgttgtactgggatgtgatcgctgaaagctggcgcgcccgcgatcctagcctgtatggacggatggattttgcctggtgtggcaatgcgccggtgaagctgctggagtacaacgccgatacgccaactagtttgtacgagagcgcttatttccagtggctgtggctggaggatgcccggcgcagcggcattattccgcgtgatgccgatcagtacaatgctattcaggaacgcctgattagtcgctttagcgagctttacagtcgggaaccgttttatttttgctgctgtcaggacaccgatgaagacaggagtaccgtgctgtacttgcaggactgcgcccagcaggcagggcaggagagccggtttatctacattgaagatctcggtttgggcgtcggcggcgtactgaccgatcttgatgataatgtcatccagcgtgcatttaagctgtatccgctggagtggatgatgcgtgacgataacggtccgctgctgcgcaagcgtcgcgagcaatgggtggagccgttatggaaaagtatcttgagtaataaagggctaatgccgctgctttggcgcttcttccctggtcatcctaatcttcttgcgtcctggttcgatggcgagaaaccgcagattgccgctggcgaaagctatgtgcgtaaaccaatctatagccgcgaaggcggcaacgtcaccatttttgacggcaagaataacgttgttgaccacgctgatggtgattacgccgatgaaccgatgatctaccaggcgtttcaacctctgccgcggtttggcgatagctacacactcatcggtagctggattgtcgatgatgaagcgtgcggaatggggatccgtgaagataacacactgatcaccaaagacaccagtcgtttcgttccgcattacattgctggataagaatgttttagcaatctctttctgtcatgaatccatggcagtgaccatactaatggtgactgccattgatggagggagacacagtgcactggcaaactcacaccgtttttaatcaacctataccattaaataacagcaacttatacctgtctgatggcgcgctctgcgaagcggtaacgcgtgaaggtgctggctgggatagcgattttctagccagtattggtcagcagttaggaacggctgaatcccttgaactggggcggctggcgaatgtgaatccgcctgaattattgcgctacgatgcgcaaggacgccgtctggacgatgtgcgttttcaccccgcctggcacctgctgatgcaggcgctatgtaccaatcgggtgcacaatcttgcctgggaagaagacgctcgctccggcgcatttgtggcgcgcgcggcgcgttttatgttacatgcgcaggttgaggcagggagcttatgtccgataaccatgacctttgccgccacgccattgttgttacagatgttacccgcgccgtttcaggactggaccacgccgctattgagcgatcgctacgattctcacttattgccaggtgggcaaaaacgcggtttgttgattggcatgggaatgacggaaaagcagggcggttccgatgttatgagcaacaccacccgtgcagagcgtctggaagatggctcttatcggctggtggggcataaatggtttttcagcgttccgcaaagcgatgcgcatctggtgctggcgcagaccgcgggtggtctgtcctgcttttttgtgccgcgctttttgcctgacgggcaacgcaacgcgattcgcctcgagcggctgaaagataagctgggtaatcgctctaacgccagttgcgaagtggagtttcaggatgccattggttggttgttggggctggaaggggaaggaattcgtctgatcctgaaaatgggtgggatgacgcgttttgattgcgccctgggtagccatgccatgatgcgccgtgcatttagcctggcgatttatcatgcacatcaacgccatgtttttggtaatccattgatccaacagccccttatgcgtcatgtcttaagtcgcatggcacttcagcttgaagggcaaacggcgttgctgtttcgtcttgcgcgagcgtgggaccggcgtgccgatgccaaagaagccctgtgggcgcgtttatttacgcctgcggcaaaatttgtgatctgcaaaagaggtatgccgtttgtggccgaagcgatggaggtgctgggcggcattggttattgcgaggagagtgagctgccgcggctttaccgggagatgccggtaaacagtatttgggaaggttccggcaatattatgtgcctggatgtgttgcgcgttctcaataagcaagcgggcgtatacgacttattgagcgaagcatttgtggaagtgaaagggcaggatcgctattttgatcgcgcggttcgtcgtttacagcagcagctgcgtaagccagctgaagaactggggcgagagattactcatcagctattcctgctgggctgcggtgcgcaaatgttgaaatatgcttctccgccaatggcgcaggcgtggtgtcaggtgatgttagatacgcgcggcggcgtacggttgagtgagcagatccagaatgatttattgctgcgggcgacggggggagtgtgtgtgtaagcgtatacgactgatgcgacgctggtttcgattaactaaatgaaatatgtgaaaattgtaggccggacaaggcgctcgcgccgcatccggcattgttcatttgctgtagatgacactcatgcatacagtatcgcctgtacgcgccagttatcaggctgctggtcttcgtacatggtaataatgcggtaccaactcgcaccttgttcatcggcctttaacgccacgatacgttccacgtcctgcggatccccactaatattgctaacactgatctgacctatttcattcaggcccgtcacgcagtcagcactggcgaattctgcagactgtgccgtggcgctcgcaggataagtcactaattgcaggctgggactggcaagtaattgtttcatcgtcagctccatttttcgtttccccacatgttgcagggcattccatcgcggtaataaacgcccaggcttccagccggtaatttattgtgcacaggtaaacgcatagggacgcaaagcaatgtaaagctgactatgtaagttgtctgatttatttacggtacaaaatggcttgactataccactgtcctgtcacgatggtttcgtccaccatgacgacaacgtaataatcagcttttgcagcgacagctttcgctttgatttctgctaatgcgtcatccggagaaccccgaaccatcgtgcttacgctacctattcgctgtaacccttgcgtctggtcgcggcgaatctcttgcggatggtccgttactggcggtgctggctgtggcgtaccttgcagtgcgctacaggcacttaacatcaacaccaataataaactggcaaaccggtaaataacgctattacgtttcctgctaaccatagtgtagtgccttattaatttaactttgggggaatgttcccgaattgttacctggtacgcgattttcgaatgaaaacgtgacgaaagcgtaacccacatctcaacattatgaactaataccgccagcagaaacttgtgctaaggatttcttcatgtcataccagacaaaaaggagagacagatgattgaaatagaaagtcgcgagctggcagatattcccgttcttcatgcttatcctgtcgggcaaaaagataccccgttaccgtgcgtaattttttatcacggctttactagttccagtctggtgtatagctattttgccgttgcgctggcgcaggctggtttgcgggtgatcatgccggatgcgcccgatcacggtagccgttttagtggtgacgcagcgcggcggttaaatcaattctggcaaatcttgctacaaagtatgcaggaattcactactttacgtgcggcaatagccgaagaaaactggctgcttgatgaccgtctggcagtcggtggcgcgagcatgggcgcgatgacggcactggggattaccgctcgccaccccacggtgagatgtaccgccagcatgatgggaagcggctattttacaagtctcgcccgtagtctgtttccaccgctgatacctgaaacggcagcacagcagaatgaattcaataacattgtcgcgccactggcagagtgggaagcgacaaaccacctggaacaacttagtgacagacctctactgctgtggcatggcctcgacgatgacgttgtgcctgccgacgaaagtctacgtttgcagcaggccttaagcgagacgggacgggataaactgctaacctgtagttggcagccaggcgtgcgtcaccgcattacgcctgaggcgttagatgctgccgtgacatttttccgccagcatctttaaacacgcagaatgctgaccccttgcgcttccagttgttgcaggatttccgggttagcatttttgccggtgataagcatatcgatttgatcggcacggctaaaaagcattcccgcgcgttcgccaatcttactgctatcaaccagtaccaccagtttccctaccacgctcagcatcttctgctctgccattgctgtcagcatatcggttttatacaacccttctgcggtcagcccttttccgctggtaaacatccagtgcccggcatagagactgttttcgctgccctgcgggcttaaagtgatggactgacttttgttgtactgtccgcccataatgatcacgctgtcatgttcttgatcgatcaggtaatttgccagcggtagataattagtgatgatttgcactggcttgccacacatttcccgcccaagcagaaacgcggtggagccgcagttgatgactacgctttcgcccggattaaccagctggctggccgctttagcgatacgtactttttcatcgtgattctgcgcctgatgcagattcatcggcgtccagcgcgggcgctgttgggtaatagcttctgcgccattgcgcacttttttcagtttgccgctttcgtcaagtttattgatatcgcgtcgcgcagtggcagggctaattcccagacgctcaacgactttctcaacggtcacaaagcccaattgtgcgagcatttccaggaggatttgatgtctttgtgcttcagtcatgagctattccgataaaatttgatttttttagatgatatttgaaatagccaggaaatactacgccggatagcgcgaacttctccacgctacccggtataaacgacagattacaggaaactcttgaacggcagatccggttcaatagtgaagcaatcatcgaaaccgcgcggatagtggtactcgaagttgtctttatccagcggccaggtaaatttgccacccacctgccagataaacggcttgaagccatacttcaggcgatcttttttcatctcccacagcacgcggatctcttgcggatcggcctggaagttactccagatatcgtggtggaacgggatcactactttcgcattcagcgcttcacccatacgcagcatatcggcgctggtcattttgtcggtgataccgcgcgggttttcgccgtagcttcctaacgccacgtcgatctgatgttcgttaccgtgcttcgcataatagttagagtagtgggagtcgccgctgtgatacagggagccgccaggcgttttgaacaggtagttcaccgcgcgatcgtccatgccatctggcagtacgccagccgctttttgatcggcaggcagggtgatcagtgcagtacggtcgaaagcatcaagcgcatgaatttcaatgtctttcacttttactacatcgcccggtttgaccacgatgcaacgctctttcggtacgccccagccaatccacaaatccacacaggttttcggtccgataaacggtacgtcatctgcacaattctgcatcacggcagcagcgacgttaacgtcgatatgatcgttgtgatcgtgagtcgccagtaccgcgtcgatctggcgaatcgcaaacggatcaagaacaaacggggtggtacgcaggtttggctgcagttttttcacgccagccatgcgctgcatctggtgaccctgtttcattaacgggttaccgtgactttgtttgccagtgccgcaccagaaatcaacgcaaacgttggtgccaccttcgcttttcaaccagatcccggtgcagccaagccaccacatcgcaaatgtgccaggagcgacctgttcttgttcaatttcttcattcaaccagctaccccactccgggaaagtgctcaggatccaggattcacgggtgatacttttcactttactcatcgccatttaccttcatgatagttcaattcgaatcaatatgtgattggttttgattaatcctgacactattttttcaggaaggcaatgaccattttttgactttttgccagggaagttgttgttgattttgagtatggaaagatttaatggaatgtgtaattcaattaactaaatgaatttaaatggataattgtttcgttgtgtgaatcccactctatccatgtggaattatttgcgggtcgcgtcacatttaatcataaataatcttgttgtgattacttttgaaaattagagtgagtgcacaacattccgggtgtgtggaatacccggttacctcttcttcaggagatcgttatggagatcctctacaacatctttaccgtgttttttaaccaggtcatgaccaatgccccgttgttgctgggtattgtgacctgtctgggctacatcctactgcgcaaaagtgtcagcgttattattaaaggcacgattaaaaccataattggtttcatgttgttgcaggcagggtccggcatcctcaccagcaccttcaaaccggtggtggcgaaaatgtccgaagtctacggcattaacggcgcaatttccgatacctacgctagtatgatggcaaccatcgaccgcatgggcgatgcctatagctgggtgggttacgccgtattgttagcgctggcgctgaacatctgttacgtgctgttgcgtcgcattaccggcattcgcacaatcatgttgaccggccacatcatgttccagcaggccgggttgattgccgttacgctgtttatcttcggctactccatgtggaccaccattatctgtaccgcgattctggttagcctctactggggcatcacttccaacatgatgtacaagccgactcaggaagtgacggatggctgtggtttctccatcggtcaccagcagcagtttgcaagttggattgcctataaagtcgcgccgttcctcggcaaaaaagaggagagcgttgaagacctcaaattgccgggctggctgaacattttccacgacaacatcgtctccacggcgattgtgatgaccatcttctttggtgccattctgctctccttcggtatcgacaccgtgcaggcgatggcaggcaaagtgcactggacggtgtacatcctgcaaactggtttctcctttgcggtggcgatcttcatcatcacgcagggtgtgcgcatgtttgtggcggaactctctgaagcatttaacggcatttcccagcgcctgatcccaggtgcggttctggcgattgactgtgcagctatctatagcttcgcgccgaacgccgtggtctggggctttatgtggggcaccatcggtcagctgattgcggttggcatcctggtcgcctgcggctccagcatcctgattattcctggctttatcccgatgttcttctctaacgccaccatcggcgtgttcgctaaccacttcggcggctggcgtgcggcgctgaagatttgtctggtgatggggatgatcgaaatctttggttgcgtctgggcggtgaaactcaccggtatgagtgcctggatgggcatggcggactggagcattctggcaccgccgatgatgcaaggcttcttctccatcggtatcgcctttatggccgtcatcattgtaattgcactggcttatatgttcttcgctggccgcgcgctgcgcgcagaagaagatgcagaaaaacaactggcagaacagtctgcttaataaggagttttgattatgaccgtacgtattctggctgtgtgtggcaacggacaaggcagttccatgatcatgaagatgaaagtggaccagtttttaacccaaagtaacattgaccatacggtaaacagctgcgcggttggcgagtacaaaagcgagttgagtggcgcggatatcatcatcgcttctacgcacattgcgggcgaaatcaccgtgaccggcaacaaatacgtggttggcgtgcgcaacatgctctctcctgccgactttggcccgaaactgctggaagtgatcaaagagcatttcccgcaggatgtgaagtaaggacgcgccatgaaattacgtgatagcctggcggaaaataaatccatccgcctgcaggctgaagcagagacatggcaggaagcggtgaaaatcggcgttgacctgctggtggcggcagatgtggtagagccgcgttactaccaggcgattctggatggcgttgaacagttcggtccttatttcgttatcgctccgggcctggcaatgccgcacgggcgtccggaagagggcgttaagaaaaccggtttctctctggtaacgctgaaaaagccgctggagttcaaccacgatgacaacgatccggtggatatcctcatcaccatggcggcggtcgatgccaatactcaccaggaagtgggcatcatgcagatcgtcaacctgtttgaagatgaagagaattttgaccgtttacgcgcctgccgtaccgagcaggaagtactggatctcattgaccgcaccaacgcggcagcttaagaaggaattgaacatgagtttaccgatgttgcaagtcgcgctggacaaccagactatggatagcgcctacgaaaccactcgcctgattgccgaagaagtcgacattatcgaagtgggcaccattctgtgcgtgggcgaaggcgtgcgtgcggttcgtgacctgaaagcgctctacccgcacaaaatcgtactggcagacgccaaaattgccgatgcaggcaaaatccttagccgtatgtgcttcgaagccaacgctgactgggtgacggtaatttgctgtgcggatatcaacaccgccaaaggcgcgctggacgtggcaaaagagtttaacggcgacgtgcagatcgaactgaccggttactggacctgggaacaggcgcaacagtggcgcgatgcaggcattgggcaggtggtttatcaccgcagccgtgacgcgcaggccgcaggcgtggcgtggggcgaagcggacatcaccgcgatcaaacgtctttccgatatgggcttcaaagtcaccgtcaccggaggcctggcgctggaagatctgccgctgttcaagggtattccgattcacgtctttatcgcgggccgtagtatccgtgatgccgcttctccggtggaagccgcacgtcagttcaaacgttccatcgctgaactgtggggctaaggagcggatatgttgtccaaacaaatcccgcttggcatctatgaaaaagcgctccccgccggggagtgctggctggaacgcctgcaactggcaaaaacgttaggcttcgattttgtcgaaatgagcgtagatgaaactgacgatcgcctgagccgcctcaactggagccgcgagcagcgtctggcgctggtcaatgcgattgttgaaaccggcgtgcgcgtgccgtccatgtgcctttctgctcatcgtcgtttcccgctgggcagtgaagatgacgcggtgcgggcgcaggggctggagattatgcgtaaagctatccagttcgcccaggatgtcggtattcgcgtgatccagctggcgggctatgacgtttactatcaggaagccaataacgaaacgcgtcgtcgtttccgtgacggcctgaaagagagcgttgagatggcaagccgcgcgcaggtgacgctggcgatggagatcatggattatccgttgatgagctccatcagcaaggcgctgggatacgcgcactatctcaacaatccgtggttccagctctacccggatatcggcaacctgagcgcgtgggacaacgatgtgcagatggagttgcaggccggaatcgggcatatcgtcgcggtacatgtgaaagacaccaaacctggcgtcttcaaaaacgtgccgtttggcgaaggtgtagtggatttcgaacgttgtttcgaaacgctcaaacagagtggctattgcgggccgtacctgattgagatgtggagcgaaacggcggaagacccggcggcagaagtggcgaaagcgcgtgattgggtgaaagcgcgcatggcgaaagcgggcatggtggaggcggcataatgcaaaagctaaaacagcaggtatttgaagccaacatggagctgccgcgctacgggctggtgacctttacctggggcaacgtcagcgctatcgaccgcgaacgcgggctggtggtgatcaagcccagcggcgttgcctacgaaaccatgaaagcggccgatatggtggtggttgatatgagcggcaaggtggtggaaggggagtatcgcccatcttccgacactgcgacgcatctcgaactctaccgtcgttacccgagccttggtggcattgtccatacccactccactcatgccaccgcatgggcgcaggcggggctggcgatcccggcgttaggcaccacgcacgccgactacttctttggcgacattccgtgtacgcgcgggttaagcgaagaagaggtgcagggcgagtatgaactgaacaccggcaaagtgattatcgaaacgctgggcaacgccgagccgctgcatacgccgggaattgtggtgtatcagcacgggccgttcgcctgggggaaagatgctcacgatgcggtgcataacgcggtggtgatggaagaagtggcgaaaatggcgtggattgcccgcggcattaacccacaactcaatcacatcgacagcttcctgatgaataaacacttcatgcgtaaacacggtcctaacgcttattacgggcagaagtaaaacacgcgctgcggaaatttccttcctcgggagataactggtctaattccgcagccgtttttcaaaaaaaagccccctgcgaagggggcaaagcaaactatggcaatgtttcgttggttatacctggtgttagcgataaatatccgcgctggcgtgcatattgccgttactccccggttcccgcatcagaattacgtggtagtacgttgcgccttgcgcatctgtttcttcatttaatgcctgacgtgcttcgctttcagtggcgaaattatgattgatataaatcacgcctaagctttgcacatcgtccatatttctggcctggtggttattaatttcaatggctgcccatgtatttgcacttagcaaaagcacagccagaagggctaaaacacgactgaacatagatacctcctcgacggctgactttgtgtgctctcctctgtgatgatcttctgatttaattttaatcaatgataaagaagttgatggtgaccatttctgatgcagttgttcaaaaaaacaccatgatgaagtgtgatgaacttcaaatcagcgtgttagaggttaattgcgaaaggggagatttatttcggctctgcccttgagtttagcgaggcatacaagtactataacgcgtcatttttcagccgacctttaacacgttccttgcctccccgggattcggctgacccagacaggaggctgaataatccgtaaggagcaattcgatgcgtcattacgaaatcgtttttatggtccatcctgaccagagcgaacaggttccgggcatgatcgagcgctacactgctgccatcactggtgcagaaggcaagatccaccgtctggaagactggggccgccgtcagctggcttacccgatcaacaaactgcacaaagcacactacgttctgatgaatgttgaagctccgcaggaagtgatcgatgagctggaaactaccttccgcttcaacgatgccgttatccgcagcatggttatgcgtaccaagcacgctgttaccgaagcatctccgatggttaaagcgaaagacgagcgccgtgagcgtcgcgatgatttcgcaaacgaaaccgctgatgatgctgaagctggggattctgaagagtaatttctgatgaccaaccgtctggtgttgtccggcaccgtgtgcagggctccccttcgaaaggtcagtccaagtggaattcctcactgccagttcgtgcttgagcatcgttctgtgcaggaggaagccggctttcaccggcaggcgtggtgtcaaatgcccgttattgttagcggacacgaaaaccaggccattactcacagtataacggtcggcagtcgcataaccgttcaggggttcattagttgccacaaggcaaagaacggactgagcaaaatggttttgcatgccgagcagattgaattgatagattctggagactaaccatatggcacgttatttccgtcgtcgcaagttctgccgtttcaccgcggaaggcgttcaagagatcgactataaagatatcgctacgctgaaaaactacatcaccgaaagcggtaagattgtcccaagccgtatcaccggtacccgtgcaaaataccagcgtcagctggctcgcgctatcaaacgcgctcgctacctgtccctgctgccgtacactgatcgccatcagtaatcggtcacggtccattaatacgactttgagaggataaggtaatgcaagttattctgcttgataaagtagcaaacctgggtagcctgggtgatcaggtaaacgttaaagcgggctatgctcgtaacttcctggtaccgcagggtaaagctgttccagctaccaagaaaaacattgaattcttcgaagctcgtcgcgctgaactggaagctaaactggctgaagttctggcagctgctaatgctcgcgctgagaaaatcaatgcactggaaactgttaccatcgcgtctaaagctggcgacgaaggtaaactgttcggttccatcggtactcgcgacatcgctgacgctgtaactgcagctggcgttgaagtggctaagagcgaagttcgtctgccgaacggcgttctgcgtaccactggcgaacacgaagtgagcttccaggttcacagcgaagtattcgcgaaagtgatcgtaaacgtagtagctgaataattcgttattcaacgagacgtaaaaacgccgaccattggtcggcgttttgctttctatttttcgtcaggtattagtttcgcaagtagatccattcaccattctcttgtgtccataagtcaggatggtttgctggcgttagatacatacgagcgcaactgatgtctcgctcctgcggcactcgctcgaaacccaaaccgctgtagattgcggcactactacttaaggaacgcagaccaattttcaaatcatggggtaaatcagaatacgcgtttagcaatgcagcaatgatgaatccgagggcattagaaacgcctgtaacagtgcgaagttggtcgatataaagatcgattgttggtagttcagaactccagcaattaggcatttgggcaggaagggttacaacgtatcctatcgtttggccggtatagtctggagtaccataaccaggtcccaaaaccacttcgtgtattgtgtatttactgttgggttcgaaggattcgacatcttgcaataaatatttcagttctgcggttaacctcgcacccgcgtaagctttattgtatttctgggcgtgaatattatctaatgtagcttcatggttccatccaaaagaattatcaccattcattgtgattccatcgtaagcattacacctcgtcgctaacttattgaatgcttgccagtcactgagatctagtttgtggatctcaacagtacgtctgccatcgcaattatgatctcttccacgattactaagtaatgtagcgcgtgcgtattgatgaaattttaattttactggtttgtcggtggagctaaaacgagataaatatgcaggaaaactataaatagtcgttggtaatgtcattgtaatgttacctgtttaatgtttttataaatatcgcagctgaatgttcacagaaaaaaatcgatattaataaaaataagtttgttttctgaagtggtgaaaatagcggatggtgaaagatattaatatcaaaaatcgctcattatggatataacgatgcacccggggagaaaatgacttccacgccttacaccgtacattcttgttgtgcggtatgtaattattctacgctgtcggtatcggtgtattcgttaatcagcaggttagccagccacaaaaagccattgagaaaattattgattttacatgggattattatattgctaatccttggtttttaaaaattgtgcatagtgaaaatcaaagtaaaggtgtgcattatgcaaaaagtcagcgtctcttagaaattaaccatgcgcacttgcagttaatggaatccttattggatgaagggaagaaacacaatatttttaagccagatatcgacccattgcaggtgaatattaatattgctgcgcttggcggatattatttgatcaaccagcatacgcttggcctggtttatcacatcagtatggttagtccccaggcactggaagccagacgtaaggtcatcaaagagacaatccttagctggcttttggttgaccctagttctaccgcgcacgaataattaccgcgcacgaataaaactgccatccggctggcgggtgaacaggacctgttgattattccccgtatcaatggttaagcccgtcaccacgccgctggcgttctggcggattttcaccatctgcccgttttgcaaattactcagcggcttacccgcgccttctacctgcgccattgcatagacatcggtagcgggcagtccgtggtcgcggaacagctgcgccatcgttttaccgggttcgacacggtaagagcgccattgattatcaattccgctatctggctggaatggttgcgtttgggtagtttgcggctgctcttctggctggccttcctgtataggttctggagcgaccggagccacctgatcaggaccattttgtggggtaactaattgcgcccgcagctgttcttctgtcggcggttgactttggctctgaatatctaactgcgcttcacgcgtcaccaccggcgcgttgggcgtatcatcagatggaagcagaaatccgaccaccaatacaatggcggcaataatgatcccccgacgatgcatcggcggcagcgggtccatgaagcgaaaattgtccggcgcgtgccagactttctccagggttggttttagttcaaagcgcccgggcatggtttcctcctgctccgcgtcttgttcctcaatcatagcctatgaataagctaacgctatgatgtccgtggtaaacccgcctttattatattcatacgggatattgctattgtttctttttccctgggatttgtcatcattcccgcgacaaagttttacccaaagaagtgtggctgatatgctgcccgctactttataccctaagaaaggaaatacgatgaccaccccaacttttgacaccatcgaagcgcaagcaagctacggcattggtttgcaggtagggcaacaactgagtgaatctggcctggaagggctgctgccagaagcactggttgcaggtattgccgatgcgctggaaggcaaacatccggctgttccggttgatgtggtgcatcgcgcgctgcgtgaaatccacgagcgcgccgatgccgttcgtcgtcagcgtttccaggcgatggctgctgaaggtgtgaaatacctggaagaaaacgccaaaaaagaaggtgtgaatagcaccgaatctggcctgcaattccgcgtgatcaaccagggtgaaggcgcaattccggcacgtaccgaccgcgttcgtgttcattacaccggtaaactgatcgacggcaccgtgtttgacagctccgttgctcgtggtgaacccgctgaattcccggttaatggcgtgatccctggctggattgaagcactgactctgatgccggtaggttctaaatgggaactgactatcccgcaggaactggcatatggcgagcgcggcgcaggcgcatccatccctccgttcagcaccctggtgtttgaagtcgaactgctggaaatcctctaagcagcgcattctgttcccctcgaacgagaggggagcaggcattcagcaataaacccttcagtttgccaaacggcgctattttgtgttgcaaagaccccgtaagcgtgtatttttgtgagctgtttcgcgttatcaccgtgatatgacactcactttaaacataaaattaacattagatctaaatcttagtattcatcccgcgtattgttacctaatatcgatgagtcccgatacagattcgtcgtatcatagactgactaaaggccgtagagcctgaacaacacagacaggtacaggaagaaaaaaacatggtagatcaggtaaaagtcgttgccgatgatcaggctccggctgaacagagcctacggcgcaatctcacaaaccgacatattcagcttattgccattggcggtgccattggtacggggttgtttatggggtctggcaaaacgattagccttgccgggccgagcatcattttcgtttatatgatcattggttttatgctctttttcgtgatgcgggcaatgggggaattgctgcttagcaatctggaatacaaatcttttagtgacttcgcttccgatttactcgggccgtgggcaggatatttcaccggctggacttactggttctgctgggttgtaaccggtatggcagacgtggtggcgatcacggcttatgctcagttctggttccccgatctctccgactgggtcgccagcctggcggtgatagtgctgctgctgacgctcaatctcgccaccgtgaaaatgttcggtgagatggagttctggtttgcgatgatcaaaatcgtcgccattgtgagcctgattgtcgtcggcctggtcatggtggcgatgcactttcagagtccgactggtgtggaagcgagtttcgcgcatttgtggaatgacggcggctggttcccgaaaggtttaagtggcttctttgccggattccagatagcggttttcgctttcgtggggattgagctggtaggtacaacagctgcggaaaccaaagatccagagaaaagtctgccacgcgcgattaactccattccgatccgtatcattatgttctacgtcttcgcgctgattgtgattatgtccgtgacgccgtggagtagcgtagtcccggagaaaagcccgtttgttgaactgttcgtgttggtagggctgcctgctgccgcaagcgtgatcaactttgtggtgctgacctctgcggcgtcttccgctaacagcggcgtcttctctaccagccgtatgctgtttggtctggcgcaggaaggtgtggcaccgaaagcgttcgctaaactttctaagcgcgcagtacccgcgaaagggctgacgttcagctgtatctgtctgctcggcggcgtggtgatgttgtatgtgaatcctagtgtgattggcgcgttcacgatgattacaaccgtttccgcgattctgtttatgttcgtctggacgattatcctttgcagctaccttgtgtatcgcaaacagcgtcctcatctacatgagaagagcatctacaagatgccgctcggcaagctgatgtgctgggtatgtatggcgttctttgtgttcgtggtcgtgttgctgacactggaagatgacactcgccaggcgctgctggttaccccgctgtggtttatcgcgctggggttgggctggctgtttattggtaagaagcgggctgctgaactgcggaaataaccgcattatcatgctggatggcgcaatgccatccagcttttagatcactcacccgccagcgcgcgtgggaacagtacattgttttccagactgatgtgatccatcaggtcatcaatcagttcattaatgccgttatacatcgctttccaggtggtgcaggcttctggcggcggtgtgacgttattggtggtgtgtttaatcacttccagcagttcgcccgcttcatcgtgctcgctttccattacgctgattggccccattgcctggctgcccatgccttgtttgatcatcgggaagaggatctgctcttctttcatcatgtggctggaaagctcttcatgcagcatggtcaggtattttgtcagcccttttggcacgctcggtttgtcggcgtgaacgcgctcgactttagtcgcttgcagaatcagctccggcagttgctcgcggtgacgatcgtggtagcgcacgatgatatggtcgatgatttctgccagcggggcgctacgccagtctttctcaatcggttgttcagcgagctttgccagttcagcttcaatgacctcaacatccagttctttacgtgccgccgcgcgcgccagcgtctgcttaccgccacagcagtaatccatatcatatttacgaaacagagcactagcgcgaggaatagagagcgccagttcacctaaaggttggtcgcgataagccatagctgatacctcattcttaataagataagatgtattttaaatgcatctttaaggcaaaagctataacccttacgtagcagaggcttatttaactcactgccagcgtgtcaactttcactgacagattcagttaaaggtttttctggttttgctctgaccgcgatgaccacgccaatcactaacagcgcgataccgctcagcgtcattagcggcggcatttgctggcggagtaaaaaggtgtacagcaaacctgccagcgtttcgaaaacaatcagcggcccgagaatcactgtcggtaatagctggctggcgacgttccagcagagtgcgccaacccaactgcaaagcacggctatcgcaaccatcagactaataaacaccagcggacgggggccaaagggtagggagaagtccggcgtttgcgtattcagccagtaacaagcgacgagatagccgataagactaaccggcagtgtgaccagcgcctgcgctgttgcccacatcatcggatgtttgtcgggattttcccgcagccagcgggcgttgcgcagggcataccacgcccagcagaccacggaaactaacgccagcacgatgccagaggtataacgtgcccagtcaaaatcggggagtccgtggtttaactcagcaatattcacacacgccaggccgatgccaatacaaatcagtgctggggcgagttttccccacgcgagtttgccgtcgcgctggctataaagcagattggcaaagacaggaatgaccaccggcagggtgccgataatcatcgtggaaacaggcgcgccagtacgttgaatggcactggcaaggcagaagtaatagatgaggttgcccatcatagtgagcatcaaggcggtaagccagtcgcgacgcgccaactgacgcagacgcacgcgtcccagccaggcaatgggcagcgcaattaaccctaacgccagataacgccccatgctctgcaacatcgccgggtattccggcacgatcaacggcccgacaaaaataagcccccacatcaaccctgctaacagggcgtacagcacgccgctaatcattactggcatccattgatctgtcagaagaaagttcaggaagcagacatgattgctcccggcatcccgtcattatcagagaggatgcgggaggatgccactttaattaattagttattaacattaaaaagatggcttacgctttcggctaacgttgtcgttgggtggccaatcaatttgctaagtgttttgctgtcatcaaacagaccgcctttgcttgcgccaacgtcagaatccgccagcatatccgccagtccgtcgggcagtccgacgcttttcagtgccgcggcgaaatcggcttcgctcagattttgataggtaacctgtttgccgctctgtttggtcagctctgccgctaactgtgtcaacgtccaggcactatcgcccgccagttcgtaaaccttgccttcgtgaccggcttcgctaatcacgcgtgccgcagctgccgcataatctgcccgcgttgcactggcgattttgccatcgcccgccgcaccgataaatacgccgtgttccagtgctgccggggcgctggcgaggtagttttcgctgtaccagccgttgcgcagcagggtgtaaacgatgccagaatcagccagcattttctccgtctcgatgtgctcatcggcgaggccgagcggggaggtatctgcatgtagcaggctggtataagcgataaatttcacgccagccgcctttgcggcattaataacattacgatgctgcggggcacgttgacccacttcgctggaagagatcagcagtagtttttccactccctgaagtgcagatgtcagtgcggcttcatcgccgtagtcagcctgacgcacggtaatgccttgtgctgccagggcttgggcttttgccggattacgaacgatagccactatttggctggcaggaaccgttttcatcaaggattcaataacatagtgaccaagttggccagtggcaccagtaatagcgatcatgggaagtctccatcgttttgtcttgtgtttaaatacgctaacacctaaacttacttttagtaagtacgtacaaaaaggtaagtatgaaatgagtcaggttagcctgagccaacaactgaaagagggtaatctctttgcggaacagtgcccgagccgcgaggtgttgaaacacgtcaccagccgttggggggtgttgattctggtggcgctacgcgaaggtactcatcgctttagcgacctgcggcgcaaaatcggtggggtgagtgaaaagatgcttgcgcagagcttacaggcgttagaacaggatggttttcttaaccgtatcgcgtatccggtggtgccgccgcatgtggaatatagcctcacgccgctgggcgagcaggtgagcgaaaaggttgctgcactggcggactggattgagttgaatttgcccgaggtgttggcggtgcgggatgaacgtgcggcataactgccggatgcgctgagcttatctggtctacggtgcatggcttgtagggcggataagatgcgccagcatcgcatccgccaataaatgccggatgcggttgatgatttataggccgaaaaagaagtgttttacttactcaaatccacctgataaatcgcaaacccgatatcatcggtcgcgactttattcatcggatactgccctttctctttaataaacgctgcggctttatcactcggagaggtttcgaaacggatatccagtttcttatcgccagctatcggtgctaaacgccagttgttatctgccgccgggtgaatttcccccgcacgtttgctctcatcagcaatccacgctgccagcacgctgcggttctcatccggactagcaaaagcgatatggctgtcgcccgtaccggcaaatttgccgccgtaagcgcgatagttattggtggcaaccaggaacatggcgttcggatcaatcggcttgccattaaaggtcaggttcttaatcctttccgcattggcattaatcatctggcactcgccgtcataacgggcgggctgggtaacatcaatctgataattcacaccatcaataacatcaaagttataagtgcggaaaccatcccagttgatgagactctgtggtttcgtgctgttgggatcaatctggttaaactgtcccgcggagcactccagccactctttcacctctttaccgctggctttcaccacaatcagcgtattgggatagagataaagatcggcggcattacggaaggtcaactggcctttttccacctccacatagcttgccgggtcatttttgcgaccaccgactttaaacggtgcggcagcactaagcaccggcagttttgccagatccggatcgccctgaatgtaatgctcgacatacgctttttgcgcgttgttcaccacctgcacggtcggatcgtcctgcaccagcgccagatagctatacatattgtcggcagatttaccgattggcttgctgacgaactggcgtgtggcatcgtgatcggctttgagtgtttctaccagcttgctgtcttccgccgcgagggattttttattagcgatgtcgtaaatcggtcgtgcttccgctttcgcctgcgtcacctgccatttaccgctgtcattactgagttgtaagtcgaccacaccaagatgatcgccccacatgcctggcattaccgccggaacaccattcagcgtgcctttggcgatatcagccccttcgatatcagcaaaatctttacctgggaaaacggcgtgagcatggccaaacataatggcgttaacgcccggaatttcactgaggtaataaacactgttttccgccatcactttatacggatcggcagatagcccggaatgtgccagaacgacaacaacatcggcacctttctcgcgcatttcaggcacgtatttgcgcacggtttcggtaatatcattcaccgtcactttcccggataaattagctttatcccagcccatgatttgtggtggcacgacgccaatatagccaatcttcagcgtctgtttttttccgtctttatcgaccacttcggtgtctttaattaaatacggtgtaaacattggctgtttggttctggcgtcaatgacgttggcatttacataagggaatttcgctcctgccagcgcatttttcaggtaatccagaccgtagttaaactcgtggttgccaagcgttccgacggtatagtccagcgtatttaatgccttatagaccgggtgaatatcacctgcttttaatcctttcgcgctcatgtaatcggccagcggactcccctgaatcaaatcgccgttatcaaccagtacgctgtttttcacttcattgcgggcatcgttaatcaggcttgccgtacgtaccagtccgaatttttccgtggcggtgtctttgtaataatcgaaatccatcatgttgctatgcagatcagtggtttccatgatacgcagatcgaccgtcgctgcattcacactggcggcaatcagcgtggccaggagcgttgcgctaaacttaatcatcagggacatccttttatcatcgggaatacgaaagaaaagggagaataaacgtcttacttatagaacagtgaagaatgccacaattttacgctttgaaaatgatgacactatcacagttggcgcattcattaacgatagggtataagtaaaacaataagttaacaccgctcacagagacgaggtggagaaatgttagatcaagtatgccagcttgcacggaatgcaggcgatgccattatgcaggtctacgacgggacgaaaccgatggacgtcgtcagcaaagcggacaattctccggtaacggcagcggatattgccgctcacaccgttatcatggacggtttacgtacgctgacaccggatgttccggtcctttctgaagaagatcctcccggttgggaagtccgtcagcactggcagcgttactggctggtagacccgctggatggtactaaagagtttattaaacgtaatggcgaattcaccgttaacattgcgctcattgaccatggcaaaccgattttaggcgtggtgtatgcgccggtaatgaacgtaatgtacagcgcggcagaaggcaaagcgtggaaagaagagtgcggtgtgcgcaagcagattcaggtccgcgatgcgcgcccgccgctggtggtgatcagccgttcccatgcggatgcggagctgaaagagtatctgcaacagcttggcgaacatcagaccacgtccatcggctctagcctgaaattctgcctggtggcggaaggacaggcgcagctgtacccgcgcttcggaccaacgaatatttgggacaccgccgctggacatgctgtagctgcagctgccggagcgcacgttcacgactggcagggtaaaccgctggattacactccgcgtgagagcttcctgaatccggggttcagagtgtctatttactaaattcagatggcagaaacagtgtatttcctgattctgccatcctgatttctcccaacctaaaaagttataaataaaaagagattgtatttaaagtgcaaaaattcaattgctaataagttacattttaataatgagcgttttttgatagtttacttctatagtgagatatttaatggcgacataaagtaaccaaataaaataaggttgtcatatgttacccaggatcagacacaataattttattggtgcggtggagttatttgtaaagtctagctatacaaaaacacatagtaacaatttttttaacaacatccatcatgcatttaagaaaaaagattggattagcaattatgatagcctgttaactttgagggagttctttcgttgcgcaactcagattgataaaagtggttatcaggtgcttagtagtaaaaatgaaactgttcacgccatggataagtttcttatcagtttcagccttaaagataacggtgccgaatatacaatgacattgcgaggtagtggatttgaatacgaagaaatacccataacaataaatgaatataacagtttcatggatttcaaaaaccgtgaatttccgttagaacaaaacagacgattgtatgcccgggatattctacagaaaaaacagtctgacataccgaaaaggattaaaggttatattcaccaggcgattggtgacgtgtctttaggttatgccttattggaggatatagtaagcaaattaaaacggggtaaatttgaactccaaataccaggaggtggaattaaagaatgcgatggatggtatatttacgaaaaaataattgatgataattttgccatagtcatagaatctttgggctttgcgcttaaaatctatggaggggatgaacgttttcgtaatggttcctctgttgttttggaggatgaagattactctcttatttataattttctggttaatgcaggttgccaacaagtcgaattagccgaacaagtggatgcgatagtaagtgcgaatctggccgcagatagcgatattaccaaagaaaagatttgcgagaaatataaaagcaccattgaggcgtttaaaaaagagcaactagcgttaccagtattagttcggcgtaagaacagtgagacttaattcccctatcccatagataacgataggggaaaattatttttgcagaatttatgttattgccattatttgagcaacttttgcagcaggtccatcacttgctgcacctcttccggtgtgagcgccccgtctttggcccattgcacgcgaccatccttatccagcaccactacagcggaactttcttcatccagctgccaggcaccgagcgcgacgccattgctatcgacaataaactggctccagggataaagctttttattactctccagactgctgcgcacaaacatcccactacccggaatcgcgtcgtcggtgttaacaatggtggtggtctggtaacgatcgtgcggtaacttcgcacttttaatcgcttcaatcagcgtcgcgtttttctcttttgcagaggtgcgaccagcaatatgttgcagtactcgcacttttcccactaactgcgcgctgttccaggttttgtagctaaactgatctttatcaagcaccaactcgccccgatcggtaatgccaatcggcggcactcgctgaccggtttcgaactgatgtgcggaagccatcatcggcaacagcaggcaggtgagtgccagaatcttgcgtagggtcatggtgtttccttcttatgatatgcaggtgatccgaccacttgggtctgagttttaatcatatgtgctatttatcgaatttcccgcaagtgtgatgccagtttgcggtcaagcgcacaaatcatatgaaaaatgaatgcttatactgaagaccgcgcttcggtaaaaagataattctgaataattgtaacctttaggtaaaaaaagttatacgcggtggaaacattgcccggatagtctatagtcactaagcattaaaatttgcgcctcataatagttgggccgattgtggcaccgcacaggcgtaatactcagcaggagataacaatgaaaattttccaacggtacaacccacttcaggtggcgaagtacgtaaagatcctgttccgtggacggttatacatcaaggacgttggcgcttttgaattcgataagggtaagattcttatcccaaaagtgaaggataagctgcatttgagtgtgatgtccgaagttaaccgtcaggttatgcgtctgcaaacagagatggcttaaccaaagtgctatgcagtaaaaagtgctatgcagtaataagacggctcctgattcaggagccgttgatgtttctgggggttacgcgacgctttcttctttatctttagcgtcaggcagttttgggctaagggcggtggccttgctgtcgatccgggtcaccagcagctggtcgatgcggtagttatcgatatccaccacttcaaatttgtagccggcgaatttcacgctatcggtgcgtttcgggatcttacgcagcataaacatcataaagccgccgatggtttcgtagttgccgctctgcgggaactcgtcaatatccagcacgcgcatgacgtcgtcaattggggtgccgccgtcaatcagccaactgttctcatcacgggcgacaatctgctcttccagcccctgaccgaccagatcgcccatcagcgtggtcatcacgtcattgagggtgatgatccccaccaccagcgcgtactcgttcatgatcaccgcgaagtcttcacctgcggttttaaaactttccaacgcctcactaagggttaacgtatccggcacaatcagcgtgttgcgaatttgtacgccgctgttcagtgccaggctttggttagccagcacgcggttcagcaggtctttagaatcgacataaccgatgatgtggtcaatatcttcattacagacgaggaacttagagtgcggatgttccgccaccttattcttcaggctttgctcatcttcgtggagatcaaaccaaatcacgttttcacgcggtgtcatactagacggaacggtacgggattccagctcaaagacgttttcaatcagctcgtgttcctgtttacgtaacacgcccgccagcgcaccggcttccactaccgcgtagatgtcatcagaagtgatgtcatctttacgtaccattggcagtttgaaaatacggaagattatgttcgccaggccgttgaagaaccacaccagcggggtgcaaacgtacaggcagaagcgcatcgggttgatgatacgcaaagccacagcttctggcgcaatcataccgatgcgtttcggggttaaatccgcaaacaggataaacatgccagtcactaagctgaaagagagaataaagctcagttgctcagagagctctgcgctcatatagcgggagaacaggctgtgaaaagctggagaaaatgccgcatcaccgacgataccgccgagaatcgccactgcgttcagaccgatttggaccacggtaaagaacatgccgggattttcctgcatattcagaacgcgttgggcatttatattgccttcatcagccagcagtttaagtttgattttgcgactggcggcaaggctgatctcggacatgctgaagaacgcacttacagcgatcaagcagagtatgactaaaatactgtttaacatatcttatccgacctttcaggccagatcctcggaaggggaagttgattaatttgtgtgaaatacacattgaaagccgattcgaagaaagtgaaccggcattttcagtggctagtatagcgtaaggtactgtaaagccgccagagggttaaaattcagacagctgaaaaatgcaaaactgcctgatacgctatgccgatcaggcctacgcagtccttgcaatatattgaatttggacgattttgtaggcctggtaagtcgtttacgccgcatcaggcatagacaaagagcactttatcaacaaactacatttgtacccgtaacgttatgcttccggcggcagacagacgccaattccgccaattccacagtaaccatacgggtttttatgcagatattgctggtggtcatcttcggcataataaaacggtgtggcgttagcgatttccgtggtgatgtgacgatcgtcatcggcggcaagcatcgccgcctgaaaacgttccagactggcgcgagctgcggcatcctgttctggggtcagcggataaatcgcactacgatactgcgtgccgtggtcattgccctgacgcattccctgggcgggatcgtgattctcccaaaatacctgtagcaactgctcatagctgatgacggaaggatcgtaaacaatgcgtaccgcttcggcatgacccgtatcaccggagcacacttcccgataagtcggatttggcgtatagccgccggtatagcctgcggcggtgctgtaaacgccgggtaactgccagaacagacgctccacaccccagaaacaacccatcgcaaaaatggcaatctccattccgtcaggtacattggtcatactgtgaccgttgaccgcatgcagcgtggctacgggcatcggggtgttacgtccaggcagggcatcggcgggggaaaccagatgctttttatcaaataaactcatggtgtcgctctcccgaaaatcggtcattggggttaaggttgtaacaagaggcgtatttgcacacaataaccaccgtgaataggtctaaagtaaaacataagaaatatttggggtttagtctgctttttaatccatattactggatttttgttaagccgtttaacggcgttccaggggcaggaaaaaaggatattcaggagaaaatgtgcgctatatccgacagttatgctgtgtaagcttactctgcttaagcggatctgccgtcgccgcgaacgtccgtctacaggtcgaggggttaagcggacagctggaaaagaacgttcgtgcgcagctttctacgattgaaagtgatgaagtgacgccagaccgtcgctttcgcgcacgcgtcgatgatgccatccgcgaaggtctgaaagcgctgggttattaccagccgaccattgaatttgatctccgtccaccgccaaagaaagggcggcaggtattgatcgccaaagtcacgccaggcgtgccggtgttaattggcggcaccgatgtggtattgcgcggcggcgcgcggaccgataaagactatttgaaattgctcgatactcgcccggctattggcacggtactgaaccagggcgattatgaaaatttcaaaaagtccttaaccagcattgcgttgcgtaaaggttatttcgatagcgaatttaccaaagcgcagctgggcattgcgctcggcctgcataaagccttctgggatattgattataacagtggcgaacgttaccgctttgggcatgtgacctttgaaggaagtcaaatccgcgatgaatacctgcaaaatctggtgccgtttaaagagggcgatgagtacgaaagcaaagatctggcagaactgaaccgccgactttctgctaccggctggtttaacagcgtggtggtggctccacaatttgataaagcgcgcgaaacgaaagtattaccattgacgggcgtggttagcccgcgaacagaaaacaccatcgaaaccggggtcggttactctacggacgtgggaccgcgcgtgaaagcgacgtggaaaaagccgtggatgaactcttatggtcacagtctgaccaccagtactagtatttccgcgccggaacagaccctcgacttcagctataaaatgccgctgctgaagaatccactggaacaatattatttggtgcagggcggttttaagcgcactgacctgaacgataccgaatctgactccactacgctggtggcttctcgctactgggatctctccagcggctggcagcgtgccattaacctgcgctggagtctcgaccactttactcagggtgaaattaccaataccacgatgctgttttatcctggggtgatgattagccgcacgcgttctcgtggtggcctgatgccaacctggggcgacagccaacgctactctatcgactactccaacacggcctggggtagtgatgtcgatttctccgttttccaggcgcagaacgtctggatccgcacactgtacgatcgccatcgttttgttacacgcggcacgctgggctggattgaaaccggtgatttcgacaaagtaccgccggatctgcgtttcttcgccgggggcgaccgcagtattcgtggctacaaatacaaatctatcgctccgaaatacgccaacggtgacctgaaaggggccagcaagttgataaccggaagcctggaataccagtacaacgtgaccggaaaatggtggggcgcggtgtttgtcgatagtggcgaagcggtaagcgatattcgccgcagcgactttaaaaccggtaccggggtcggcgtgcgctgggaaagcccggtcgggccaatcaaactcgattttgccgtaccggtcgcggataaagacgaacacgggttacagttttacatcggtctggggccagaattatgagtttatggaaaaaaatcagcctcggcgtggttatcgttatcttactgttgctgggaagcgtggcgtttctggtgggcaccaccagcggcctgcatctggtatttaaagcggcggatcgctgggtgccaggactggatattggcaaggtcaccggcggctggcgcgatctcaccttgtctgacgttcgttatgagcagccaggcgtggcggtaaaagcgggcaatctgcatctggctgtcgggcttgagtgcctgtggaacagcagtgtttgtattaatgatctggcgctgaaagacattcaggtcaacatcgacagtaaaaaaatgcctccttctgaacaggttgaagaagaggaagatagcggtccgctggatctctccacgccgtatcccatcaccctgacacgggtggcactggacaacgtcaacattaagattgatgacaccacggtaagcgtgatggacttcacctccggcctgaactggcaggagaaaaccctgaccctgaaaccgacgagcctgaaaggcctgctgattgctctgccgaaagtggcggaagtggcgcaggaagaagtggtcgaaccgaaaattgaaaatccgcagccggatgaaaagccgctcggcgaaacgctgaaagatctcttttctcgcccggtattgccggaaatgaccgacgtgcatttgccgcttaacctgaacattgaagagtttaagggcgagcagctgcgcgtgacgggcgacacggacatcaccgtgagcaccatgctgctgaaagtgagcagcattgacggcaatactaaactggacgccctggatatcgattccagtcaagggatcgtcaacgccagcggcacggcgcagctgagtgacaactggccggtggacatcactctcaacagtacactgaacgtggagccgttgaaaggtgaaaaagtgaagctgaaaatgggcggcgcgctgcgcgaacagctggagattggcgttaatctttccggtccggtggatatggatttacgcgcccagacgcgactggcggaagccggattgccgctcaacgtggaagtgaacagcaaacagctttactggccgttcactggtgagaagcagtatcaggcggatgatctgaaactgaaacttaccggcaaaatgaccgattacacgctctctatgcgtacggcagtgaagggacaggagatcccgcccgcgactattaccctcgacgccaaaggtaatgaacagcaggtcaatctcgacaaactcaccgtcgcggcgctggaagggaaaactgaactcaaggcgttgctcgactggcaacaggccattagttggcgcggtgagctaacgcttaacggcattaacaccgccaaagagttcccggactggccgagcaaactcaatggcttgattaaaacccgcggtagcctgtacggcggcacctggcagatggacgtgccggagttgaagctgaccggtaacgttaaacagaacaaagtgaacgttgacggcacgctgaaaggcaacagttatatgcagtggatgatcccagggcttcatctggaactcgggccaaacagtgccgaagtgaaaggcgagctgggggtaaaagatctcaatcttgatgccaccatcaacgcgccggggctggataacgcgctgccggggcttggcggtacagcgaaagggctggtgaaagtacgcggcacggtggaagcgccacaactactggcagatatcaccgcgcgcggcctgcgctggcaggaactttccgtggcgcaggttcgcgtggaaggcgatatcaaatccaccgatcagatcgccgggaaactcgacgtacgcgttgagcaaattagccagccggatgtaaatatcaacctcgtcaccctgaatgccaaaggcagcgaaaagcagcacgagctacagttgcggattcagggggagcctgtctccgggcagcttaatctggcaggaagttttgatcgcaaagaagaacgctggaagggaactcttagcaatacccgcttccagacgccggttggcccgtggagcctgacccgcgatattgcgctggattaccgcaataaggagcaaaaaatcagcatcgggccacactgctggcttaacccgaatgcggaactgtgcgtgccgcaaactatcgatgcgggggccgaagggcgtgcggtggtgaatctcaaccgcttcgacctcgccatgctgaaaccgtttatgccagaaaccactcaggccagcggtatcttcacgggtaaagcggacgttgcctgggacaccacgaaagaggggctgccgcagggcagtatcacccttagcgggcgtaacgtgcaggtaacgcaaaccgtcaacgatgcggcgctgcccgtggcgtttcagacactgaatctgacggcggaattgcgtaacaaccgtgccgaattgggctggaccatccgcctgaccaataacggccagtttgatggacaggtgcaggtgaccgatccgcaaggccgccgtaatcttggtggcaacgtcaatatccgtaacttcaaccttgcgatgataaaccccatctttacccgtggggaaaaagcagcggggatggtgagtgccaacttgcgtctgggtggtgatgtgcaaagcccgcagttgtttggtcagcttcaggttacgggtgtggatatcgatggcaactttatgccgtttgatatgcaaccgagccagcttgcggtcaactttaacggtatgcgcagcacgcttgccggtacagtacggacccagcagggtgaaatctacctgaacggtgatgccgactggagccaaattgaaaactggcgggcgcgggtaacggcgaaaggcagtaaagtgcggatcaccgtgccgccgatggtacgaatggatgtaagcccagatgttgtattcgaggctacaccaaacctgtttaccctcgatggtcgcgtggatgtcccttgggcgcgcatcgtggtgcacgatctgccggaaagcgcagtaggcgtctccagcgatgtggtgatgcttaacgataacctgcaaccggaagagccgaaaacggcgagcattccgattaacagtaacctgattgtccacgttggcaacaatgtgcgcattgacgcctttggcctgaaagcgcggctgacgggcgatctcaatgtcgttcaggacaaacaagggctgggtctgaacgggcagatcaacatccctgaagggcgcttccatgcctatggtcaggatctgattgtgcgtaaaggtgagttactgttctctggtccgccagatcaaccgtatcttaatattgaagctattcgtaacccggatgctacagaagacgacgtaatcgccggagttcgcgtcactggtctggcggacgaaccgaaagcggagatcttctctgacccggcgatgagccaacaagctgccttgtcttatttgctacgtggacaagggctggagagcgatcagagcgacagtgcggcaatgaccagcatgctgattggtttgggggttgcgcaaagtggccagattgtgggtaaaatcggcgagacgtttggcgtaagcaatttagcgctcgacacccagggagtaggcgactcctcccaggtagtggtcagcggctatgtattgccaggtctgcaagtgaaatacggcgtgggtatatttgactctatagcaacactcacgttacgttatcgcctgatgcctaagctatatctggaagccgtgtctggtgtagaccaggcactggatttgctctatcagttcgagttttaacaatgcgaatatttgtctacggcagtttacgccacaaacaaggcaacagtcactggatgaccaatgcccagttactgggcgatttcagtatcgataactaccagttgtatagcctgggccactatccaggcgcagttccggggaacggaacggtacacggtgaagtttatcgtattgacaacgccacgctggccgaacttgatgccttgcgcaccaggggcggtgaatacgcgcgccagttgattcagacgccgtacgggagtgcatggatgtacgtttatcaacgacccgtcgatggattaaagctaattgaaagcggcgactggttagacagggataagtaaccatatgcatacgccaccttcgggtggcgttgttttttgcgagacgactcgcattctgttttgtaattccctcaccttttgcttttctctccgagccgctttccatatctattaacgcataaaaaactctgctggcattcacaaatgcgcaggggtaaaacgtttcctgtagcaccgtgagttatactttgtataacttaaggaggtgcagatgcgtattaccataaaaagatgggggaacagtgcaggtatggtcattcccaatatcgtaatgaaagaacttaacttacagccggggcagagcgtggaggcgcaagtgagcaacaatcaactgattctgacacccatctccaggcgctacagccttgatgaactgctggcacagtgtgacatgaacgccgcggaacttagcgagcaggatgtctggggtaaatccacccctgcgggtgacgaaatatggtaaagaaaagtgaatttgaacggggagacattgtgctggttggctttgatccagcaagcggccatgaacagcaaggtgctggtcgacctgcgcttgtgctctccgttcaagcctttaatcaactgggaatgacgctggtggcccccattacgcagggcggaaattttgcccgttatgccggatttagcgttcctttacattgcgaagaaggcgatgtgcacggcgtggtgctggtgaatcaggtgcggatgatggatctacacgcccggctggcaaagcgtattggtctggctgcggatgaggtggtggaagaggcgttattacgcttgcaggcggtggtggaataaggtgtgtttatttatcgcgggcataaaaaaacccttactaaccgaagcccggcgttcagggttattacgccagaagaacttatttattctttgcgcgctcgaaggaggcaacgatttcagctttagcggcttctgcgttttcccaaccttcaactttcacccacttgcctttttcgaggtctttgtagtgctcgaagaagtgagcgatttgcgctttcagcagttcaggcagatcgttaacgtctttaatgtgatcgtattctttgctcagcttgctgtgcggaaccgcaaccagtttcgcatcttcaccggcttcgtcggtcattttcagaacgccaaccggacggcaacggatcacagaacccggctgcagcgggtacggagttgggaccagtacgtcaaccgggtcaccgtccagagacagggtgtggttgatgtaaccgtagttgcatggatagaacatcgcggtggacatgaagcggtcaacgaacagtgcgccgctctctttgtcgatttcgtatttgatcggatctgcgttagccgggatctcaataacaacgtagatgtcttccggcagatctttacccgcagggacgttgagtaagctcatgtctgtttcctttaaaaatatgtggcaaacaagtgccgagtattatagccaactcgcgccgaatgtcttcgcttgttttcgtcttcattttcctttttcaccagttttaagacggtatacagagcaggaaaatccataaccgtagccgcatttttcatagtgagatgaaagcgattacaaacttgtgattaacgttttatttacttttttgaagtgtgatgtaacgcaatctgttacataacgaattgtctatagttttttcgcgaacatcttttaaccaataataactaccccgacgaggacaaccctatgtggaaacgcttacttatagtctctgcagtcagcgcagccatgagctctatggcgttggccgctccattaaccgttggatttagccaggtcggaagcgaaagtggctggcgtgccgcagaaaccaatgtggcgaaaagtgaagccgaaaagcgcggaatcacgttgaaaattgccgatggtcagcaaaagcaggaaaaccagattaaagcggtacgttccttcgttgcacaaggggtggatgcgatctttatcgctccggtggtcgcgacaggttgggaaccggtattaaaagaggcgaaagatgccgaaatcccggtattcttgctcgatcgttccattgatgtgaaagacaaatctctctatatgaccaccgtcactgccgacaacatcctcgaaggcaagttgattggtgactggctggtaaaagaagtgaatggcaaaccatgcaacgtggtggagctgcagggcaccgttggggccagcgtcgccattgaccgtaagaaaggctttgccgaagccattaagaatgcgccaaatatcaaaatcatccgcagccagagtggtgacttcacccgcagtaaaggcaaagaagtcatggagagctttatcaaagcggaaaacaacggcaaaaacatctgcatggtttacgcccataacgacgacatggtgattggtgcaattcaggcaattaaagaagcgggcctgaaaccgggcaaagatatcctcacgggttccattgacggtgtaccggacatctacaaagcgatgatggatggcgaagcgaacgccagtgttgaactgacgccgaatatggcaggtcccgccttcgacgcgctggagaaatacaaaaaagacggcaccatgcctgaaaagctgacgttaaccaaatccaccctttacctgcctgataccgcaaaagaagaattagagaagaagaaaaatatggggtattgagggttgctatgcctgatgccgattcgtaggccggataaggcgctcgcgccgcatccggcgatggtgcactgaagcctgatgcgacgcttaccgcgtcttatcatgcctactgggagcacgctttacaccgggggaaaccatgacgaccgaccaacaccaggagatcctccgcaccgaaggattaagtaaatttttccccggcgtcaaagcgttagacaacgttgatttcagcctgcgccgtggcgaaatcatggcgctgctcggtgaaaacggggcgggaaaaagtacgctaatcaaagcattaactggtgtataccacgccgatcgcggcaccatctggctggaaggccaggctatcagtccgaaaaataccgcccacgcgcaacaactcggcattggcaccgtctatcaggaagtcaacctgctacccaatatgagcgtcgctgataatctatttataggccgcgaacccaaacgcttcggccttctacgccgcaaagagatggaaaagcgcgccaccgaactgatggcatcttacggtttctccctcgacgtgcgcgaaccgctcaaccgctttagtgtcgcgatgcagcaaatcgtcgctatttgtcgggctatcgatctctctgccaaagtgctgatcctcgatgaacccaccgccagtctcgacacccaggaagtggagttactgtttgacctgatgcgtcagttgcgcgatcgcggcgtcagcctgatttttgtcactcactttctcgatcaggtctatcaggtcagcgatcggatcaccgtcttacgcaacggcagtttcgtaggctgtcgggaaacgtgcgagctaccgcagatcgaactggtaaaaatgatgctggggcgcgagctggatacccacgcgctacagcgtgccgggcgaacattgttgagcgacaaacccgttgccgcgttcaaaaattacggcaaaaaaggaacgatcgcaccgtttgatctcgaagtacgccccggcgagatcgtcggtctggctggattgctgggaagtggacgtaccgaaaccgccgaagtgatcttcggtatcaaacctgctgacagcggcacggcgttgatcaaaggcaaaccgcaaaacctgcgaagcccacatcaggctagcgtactgggcattggcttctgcccggaagacaggaaaaccgatggcatcatcgctgccgccagcgtgcgggaaaatatcatcctcgctctccaggcccagcgcggctggctacgtcccatttcccgcaaagaacagcaagagattgccgaacgctttatccgccagcttggcattcgcacacctagtactgaacaaccgattgaatttctctccggcggcaatcagcaaaaagtgttgcttagtcgttggctactgacccgaccgcaatttctgatcctcgatgagccaacccgcggcattgatgttggtgcccacgccgagatcatccgcctgattgaaacgctatgcgccgatggtctggcgctgctggtgatctcctccgaactggaagagctggtgggctatgccgatcgggtgattatcatgcgcgatcgcaaacaggtggcggagatcccgctggcagagctttccgttccggcgatcatgaacgccattgcggcgtaaggagaacagtgtgatgcctcaatctcttccggacaccactacgccaaaaaggcgctttcgctggccgacggggatgccgcagctggtagcactgttgctggtgctgctggtcgatagcctggtagccccgcatttctggcaggtggtgcttcaggatgggcgtttgttcggtagccccatagacattcttaaccgtgcagctcccgttgcgttactggcgattggcatgacgctggtgatcgccaccggtgggattgatctctccgtaggggcggtgatggctatcgccggagccacaacggctgcgatgacggtcgcgggattcagcctgccgattgttttgttaagcgccctgggcaccggcatcctggcgggattgtggaacggcatactggtagcgatcctcaaaattcagccgtttgtcgccactctgatcctgatggtcgccgggcgcggcgtggcgcaactgatcaccgccgggcagatcgtcacgtttaacagcccggatctcagttggttcggcagtggaagcctgttgttcctgccaacgccggtcattatcgcggtgctgacgcttatcctgttctggctgttgacccgcaaaacggcgctggggatgtttatcgaagccgttggtatcaacattcgggcggcaaaaaatgccggggtaaacacgcgaatcatcgtcatgctcacttatgtgttgagcgggctgtgtgcggcgattgcgggcattatcgtggcggcggatattcgcggtgccgatgccaacaacgctgggttatggctggagctggacgccattctcgcggtggtgattggcggcggaagcctgatgggcgggcgctttaacctgctacttagcgtggtgggggcgctgattattcaggggatgaacaccggaattttgcttagcggctttccgccagagatgaaccaggtggtgaaagcggtggtggtgctttgcgtgctgattgttcagagccaacgctttatcagtctgattaaaggagtacgtagccgtgataaaacgtaatttgccactgatgatcaccatcggcgtctttgtgttgggttatctttactgcctgacccagtttcccggttttgcttccacaagagtgatctgcaatatcctgaccgataatgcctttcttgggatcattgccgttggcatgacctttgtgatcctcagtggtgggatcgatctctccgtcggtagcgtgatcgcctttactggcgtgtttctggcaaaagtgattggcgatttcggcctcagcccgctgctggcgtttccgctagtgctggtgatgggctgtgccttcggcgcatttatggggcttctgatcgacgccctgaagatcccggcatttatcattacgcttgcggggatgttctttttgcgcggcgtcagctatctcgttagcgaagagagcattccgataaaccatcccatttatgacacgctcagtagccttgcgtggaaaatccctggcggcggtcgcttaagtgcgatgggactgctgatgttggcggtggtggttatcggcatattcctcgcgcatcgtacccgttttggtaatcaggtatacgccattggcggcaacgcaacgagcgcgaatctgatggggatttccactcgcagcaccactattcgcatttatatgctctccaccggactggcaacgctggcggggattgtcttcagcatttatacccaggccggatatgcgctggcgggcgtaggtgtggaactggatgctatcgccagtgtggtaattggcggtacgcttttgagcggtggcgttggaacggtattagggacgctttttggcgtggcgattcagggactgattcagacttacataaactttgatggcacgctgagttcctggtggacgaaaatcgccatcggtattttgttgtttatttttatagcattacagcgtggattaacggtgctgtgggagaatcgtcagagtagcccagtgacaagagtcaacattgcgcagcaataaaaacgcctctccgtgtggagaggcgcaggagattacgcgtccgggaactcacggataaagcgttcgacatcttcaaccatatggtcgttgccgacaaagaaactacggcgctggtgcagggtttccgggatgatatccagaatacgctctttgccatcgctcgctttaccgcccgcttgttccgccaggaatgccatcgggttgcactcatacagcaaacgcagtttgccgtccgggtggctggcggtgcttgggtagagataaataccgcctttcagcaggttacggtggaaatccgcgaccagactaccgatataacgactggtataagggcggttggtggatttatcttcttcctggcagaatttaatgtacttcttcaccccgttcggaaacttaatgtagtttccttcgttgatggagtaggttttgcctttctccgggaagcgcatccgttcctggcacaggcagaaaacgccgaggctaggatcgtaagtaaaggcgtgaacaccgcatccggtggtgtaaaccagcatggtagaggagccgtataccacgtaacctgccgcaacctgtttgttaccaggctggaggaaatcttcttccgttaccggcgtgccaacaggcgtaacgcggcggtagatggagaaaatggtaccgacagagacgttaacatcgatgttggagctgccatccagggggtccatcagcaccacgtattttgcgtgttcacagccttcaaagacgacaatctcatcttcttcttcagaggcaatgcccgcaacgatatcgcgtgctttcagtgcggctttcagtttttcattagcgaacaagtcgagtttctgctgaacctcgccctgcacgttctcagcaccgctggcacccaggatatcaaccagtcctgctttgttgatatcgcgatggataatcttggcgcccagttttattgcgctcagcaaagcagtgagctcaccggtagcatgagaaaactcgtgctgcttttcgacaataaattcacctaacgttttcataaaactttccctgcaatgtttatggagtaaagcgaccgcaacaatcttaacaaataatctcaatgttgcgctcaggtgaatcgcgccagcaaattacggattatcctgaaatgcgtttctcacttgcccgacatatgcgtaaaatgagcggcagattaaaaaaggatagtgacgtatgcgcattcatattttaggaatttgtggcacatttatgggcggtctggcgatgctggcgcgccagttaggccatgaagtaacgggtagcgacgccaatgtgtatccgccgatgagcaccttacttgagaagcaaggcattgagctgattcaggggtacgatgccagccagctcgagccgcagccggatctggtgattattggcaacgccatgacccgtggaaatccgtgtgtggaagcggtactggaaaaaaatatcccttatatgagtggtccacagtggctgcacgattttgtgctgcgcgaccgctgggtgctggccgttgccggtacacacggcaaaaccaccaccgcgggaatggcgacctggattctggaacagtgtggttacaaaccgggctttgtaatcggcggtgtgccggggaactttgaggttagcgctcatctgggcgaaagcgacttctttgttatcgaagcggatgagtatgactgcgccttcttcgacaaacgctctaaatttgttcattactgcccgcgtacgctgatcctcaacaaccttgagttcgatcacgccgatatctttgacgacctgaaagcgatccagaaacagttccaccatctggtgcgtatcgttccggggcagggccgtattatctggccggaaaatgacatcaacctgaaacagaccatggcgatgggctgctggagcgagcaggagctggtgggtgagcagggtcactggcaggcgaaaaagctgaccaccgatgcttccgaatgggaagttttgctggatggcgaaaaagtgggcgaagtgaaatggagcctggtaggcgaacataatatgcacaatggcctgatggcgattgcagcggctcgccatgttggtgtagcgccggcagatgccgctaacgcgctgggtagctttattaatgctcgtcgccgtctggagttgcgtggtgaagcgaatggcgtcacggtatatgacgattttgcccatcacccgacggcgattctggcaacgctggcggcgctgcgtggcaaagttggtggtacggcgcgcattattgctgtgctggagccgcgcagcaataccatgaaaatggggatctgcaaagacgatctggcacctagtttaggtcgtgccgatgaagtcttcctgctgcaaccggcgcatattccgtggcaggtggcagaagtggcagaagcctgcgttcagcctgcacactggagtggcgatgtggatacgctggcagatatggtggtgaaaaccgctcagcctggcgaccatattctggtgatgagcaacggcggttttggtgggatccatcagaaactgctggatgggctggcgaagaaggcggaagccgcgcagtaattcggccttagccagatatagtatgcgtaggccggataaggcgttcacgccgcatccggcatttgagcatagtgcctgatgcgacgcttgatgcgtcttatcaggcctacaggtgcaccgtatccggcaaaccatactcacatcaacaacgaaaattacccttcgttctccgctaactcgcgcagatactggaaaatctggcgtgcggatttcggcggcttattcccttctttctctttcttcgcgttgcggatcagagtacgcagttgctgacgatcggcatcgggccacagatttaatacctcagcgatggcgtcatcaccttgatcgatcagacgatcgcgcaggttttccagtttatggaacagcaccacctgctggttgtgacggtttttcagcttatccagcgcctgacgaataggctctacgtcgcgctggcgcagcatcttaccgatgagctgcaactggcggcggcgaccttccatcttaatacgctgggcgagctcaatagccgcgcgcagatccgcatctaacgggatcttatccagcgcgtttttccccagatcaacaatttccgcgccaaggcgttttagctcctcggcatcacgtttaatttcacttttactgacccagataatttcatcgtcttcgtcttcgatgtcatcaccgggaacgtcgtcgagccagtcttcgggctgcttagtcatctcaggctccttaaaaaaagaggctaatgttaccagttaagatgcgcactgaaaaacggttctctgttagacttcagagaaactctctacattatggcacttgcaatgaaagtaatctctcaagttgaagcgcagcgcaagattctggaagaagcagtttccactgcgctggagttggccagtggcaaaagcgacggtgcggaagttgccgtcagcaagaccaccggcattagcgtaagcacgcgttatggtgaagtggagaatgttgaattcaatagcgatggcgcgctggggatcactgtttatcaccagaaccgcaaaggtagcgcaagttccaccgatttaagcccgcaggccattgcccgtactgtacaggcggcgctggatattgcccgttataccagcccagatccctgtgccggcgtggcagacaaagagctgctggcctttgacgcaccagatctcgacttgttccaccctgcggaagtttccccggatgaagccattgaactggcggcccgcgcagaacaggcggcattgcaggcggacaaacgcatcaccaataccgaaggtggcagctttaacagccactacggtgtcaaagtttttggcaacagccacggcatgttgcagggttactgcagtacgcgtcatagcctctccagctgtgtaattgccgaagaaaatggcgatatggagcgtgattacgcctacaccattggtcgtgcgatgagcgatctgcaaacgccagagtgggttggggccgactgtgctcgccgtactttaagccgtctgagtccgcgtaaactctccaccatgaaagcgccagtcatttttgccaatgaagtggcaaccgggctttttgggcatctggtgggggcgatagcgggtggaagcgtttatcgtaaatctaccttcctgctggatagcctgggtaaacaaattctgccggactggctgaccattgaagagcatccgcatctgctgaaagggctggcgagcacgccattcgacagcgaaggtgtgcgcaccgagcgtcgcgatattattaaagatggcatcctgactcagtggctgctgaccagctacagcgcgcggaaactggggctgaaaagcaccggacatgcgggcggtattcacaactggcggattgccggacaaggtctaagcttcgagcagatgctcaaagagatgggcaccgggctggtggtgacggaattgatgggccagggcgtgagtgccattaccggtgattattcccgtggtgcagcgggcttctgggtagagaatggcgaaattcagtatccggtgagcgaaatcaccatcgcaggtaatttaaaagatatgtggcgcaatattgtcaccgtcggtaacgatattgaaacacgcagtaatatacagtgtggttctgtgctgttgccggagatgaaaatcgccggacagtaaaaaaactggcgcgacctgccgcgctataaactaaaaaattacacaaaatcattcgcactgcatcgagacggaaagtgaatgagggccggggagcgtactcgcagtacgtgacccggtcgaatgagcgtagtcgtcgatgaggcagtgtgaaggatgaagtgtaaataaaaaaggaactattcttgcagtctcctcgttggtattcagttcggcgtcatttgctgctgatctcgaagacaatatggaaaccctcaacgacaatttaaaagtggtcgaaaaagccgataacgcggcgcaagtcaaagacgcgttaacgaagatgcgcgccgcagcgctggatgcgcaaaaagcaacgccgccgaagctcgaagataaaagtccggacagcccggaaatgaaagatttccgccacggtttcgacattctggtcggtcagattgacgacgcgctgaagctggcaaatgaaggtaaagtaaaagaagcgcaggctgctgcagagcaactgaaaacgacccgcaatagttatcacaagaagtatcgttaattcctcatttccctgttgcctgcactcaggtaacagggaacttatcatcgcaaatgatgcaccacctgattgctgctgccgcgccagatcagggaagggtcttttaaatcctgcacaaatttgccgtcgaccagcacgttaatcaaatcaacaacctgcatttgcgcagcgttgagttcgtcgagtttatagcctgtccacacccagatgtctttacccggacactcggcgcggatgcgttgtaccagtttcagaatatccggcacgttttgcggatgcagcggatcgccgccggagagggaaataccctggcgtttgatacgagtgtcattcagatcgttaatgatctggtcttccattgctttggtaaatggctgaccggaatttacccgccatgtgcttttgttatagcaaccggggcattcatgaacacacccggagacaaacagggtgcaacgagtgccggggccgttgacgatgtcgacaggatagtactgatgataattcattatttcgcctggcttatcagtccgcgtgtaggctgcatccggtaatcaatgcctgatgcgacgctgtcgcgtcttatcagacctggagcaattgccaaatgtaggccggataaggcgtttacgccgcatccggcatttgcttagctcagagtgaagattaacctatctgcccattccccaaatgtttaacgcggcgcttaacttcttcctgcttaccagcgttaaacggacgtgcatccgggctacctaaatatccgcacacgcggcgagttacgctcacacgggaggcgtcatggttaccacatttcgggcaagtgaagcctttgctggtgcactcgaactcaccggtaaagccacactcgtagcactcatcaatcggtgtattggtgccgtaatacggtacatgctgatagctgtaatcccagacatcttccagcgccttcaggttgtgctgaatgtttggatactcgccgtagcaaatgaaaccaccgttcgccagcggcgggtaaggcgcttcaaagtcgatcttgtcgtacgggttcaccttcttctccacatcgaggtggaaactgttggtgtagtaacctttatcggtcacgcccggcaccacgccaaactcagcagtatcgagacggcagaagcgatcgcacaggttttcactcggcgtgctgtagagactgaaaccataacccgtttcttctttccactgatccactgcctgacgcagacgttcaacaatggcgatacctttcgcgcgaagctgctcgttgtcgtaaacatgctcgccgccgaacagcgcgttaatggtttcgtggatgccgatgtaacccaggctaatagacgcacgaccgtttttgaagatttcagaaacatcatcgtcagcattgagacgcacgccacaagcaccttccatatagaggatcggggccacgcgcgctttcacgccttcgagacgagcgatacgggtcatcagcgccttacgtgccagcaccagacgttcatccagcagcttccagaaggtggcttcatcgccttttgcttccagagcaatacgcggcaggttcaggctgatcacgccgaggttgttacgaccatcgtggatctgctcgccgttttcattttcccacacgccgaggaagctgcggcagcccatcggagttttaaagctaccggtgactttcactacctgatcgtagttcaggatatccggatacatgcgcttgcttgcgcactccagcgccagctgtttgatgtcgtagttcggatcgccttttttatggttcaggccatcgcgaatcgcaaacaccagtttcgggaacaccgcagttttacggtttttaccgaggcctgcgatacggttacgcaggatgctttcctgaatcaggcggctttcccagctggtgcccaggccaaaaccaaaggttacaaacggcgtctgaccgttggcggtgtgcagggtgtttacttcgtactccagactctggaaggcatcgtagcactctttgatggttcgagagttagcgtagccttcggcgtccgggatgttccactcttctgcggtcttgcgatgtttgttgtagctggcagtgacaaacggtgccagcacttcatcgatacggttaatggtggtgccgccataaatatggctggcaacctgagcaataatctgcgcagttaccgcggttgccgtagagatgctcttcggcggttcaatctcggcgttccccattttaaagccctgggtcagcatgcctttcaggtcgatcaacatgcagttgaacatcgggaagaacggactgtaatcgagatcgtgatagtgaatatcgccacgctcatgtgcctgcaccacgtcacgcggcagcaggtgctgacgtgcatagtgtttagccacgatcccggccagcaggtcgcgctgggttggaatcaccttgctgtctttgttggcgttttcgttgagtaagctggcgttggtctgctcgaccagaccacggatctcctggttcaggcgaccgcgtttttcacgttcaatgtcgcgatcgtgacggtactcgatgtaagcacgagccagttgtttgtatggaccactcatcagctgattttcaactgcggtctggatctcattgatatccacctggttgcggccctgcatctgctcgctgacaaccgcggcaacagtggcgcaataatcggcatcatcgacttccgctgctttagctgcacgcagaatcgcttctttgatgcgctcacttttaaacggcactttgcagccgtctcgtttcatcacatgcggtgtcatgatcgctccatatttttaagaacaggttatccacagaaattgggaaaggcgttttccggttttttcgtttcgttttccggtgctttccgcaatcgccatccgcttatccacaacgccgcacctttttcgtggggagctgtagtagcaattatagtcgattaatacaacatattgggttgggacgcattttaaagtctatatatagtgctttgcatcaaggatgtttgagctttttttgatgtagctcaaagtaaaaagcagagcgtacggatgacgggcgctacagcgatatgtaaattttttaatgaatttgctggttgaaaaatcaacaaaaacaacatactgacagacaaaaccccggaatgaccggcattaccggggcttagggaagatttacttctgtaaccaccagacagcctcaaaaggccgtaaattcatggcacagggttgtggactggcttcttcgtagttatgcatcacaagctgccagttgccgcgcatttgccctgcctgccagggttggatctcacggctaaggttggcaatgaccagcaaggtttgccccttccattcacggcgatagcaccacaatacagggctgtttggcagcagatcctggtaattgccccatgtcaggatggcttcctgcttacgcagtgcgattaacttttggtaggtgtaaaacacgctggaatcatcggccagcgcggcttctacgttgatttgttgatagttatcgcccaggccaatccacggttcgccagccgtaaacccggcattatcgccgttgctccattgcatgggcgtgcgactgttgtcacgggatttactggcgaggattgccaataactcgtcggcatcacgcccatcgttgcgcagctcggcaaacatattgaggctctctacgtcgcgatagtcagtaatgcgcgtgaaatgcgggttggtcatgccaatctcttcgccctggtagatatacggcgttccctgcatgccatgcagcaccatcgccagcatttttgccgcaggcacgcggtattcaccttcatcaccaaagcgagaaacaatgcgcggctgatcgtggttacaccagaacaaggcattccatgctacgttgtgcattccttgttgccagtggcggaacaatgttttcaacgccacaaagtcaggtttagccagcgtccatttttcaccaccgggataatcgaccttcaggtgatgaaaattaaaggtcatgctcaattcactgcctgtcagagccgcgtatcgctggcaatgctcaaggctggtggaggacatttcacctacggtcattaacccgcgtggcgtaaacacatcgcggttcatctcgtgcaaaaactcgtgtgctcgtggcccgtcggtgtagaagcgacgcccgtcgccgtccaggtcttcagggaaacgcgggtctttggagatcagattcaccacatccaggcgcaacccgtcgaccccacgatcggcccagaactcacagacttttttcagctctgcgcgtaccgctggattctcccagttgagatccgcctgttctggtgcaaagagatgcaaatagtactgttcgctttccgcatgccagcgccacgcactaccgccaaatttactacgccagttgttcggtggcgtttctggttctccatcgcgccagatataaaactggcggtaagggctttctttgttcagcgcctcgcgaaaccaggcatgttgggtagaggtatggttaaacaccatatcgagaatgatacgaatcccgcggctttttgcctgcgtcaccagttcgtcaaaatcgtccagcgtgccgtaggtgggatcaatcgccgtatagttcgctacgtcgtaaccgttatcgacctggggagagacataaaagggggttagccagatggcatcaacgcccagtttatgcagatagtccaggtgttggataacgccacgtaaatcgccggtaccgctacccgtggtgtcctgaaaactctttggataaatctggtagataacgccgttttgccaccagtggggaagatgagtcattacgttattcctgcgaatgcgagggggcgcaattgcgccccgaagaaaattaaacaatgtccagcgtgcccaggcggtatttccgctgatagataaagctggtgagtacaatcgggatgatgatggcgatagccattgccagcgcaaacacctgccagtagctcggttgaatgctgagaattcccggcaggccgcctacgccgatgccattcgccataacgccgttcaggccgcatagcaatcctgccagaccagaaccaatcatcgcgcacagcatcgggaagcgatatttcaggttgatgccgtacattgcaggctcagtgaccccaagccaggcggagatagcggcaggcacggagatctcgcgttcattgtgcttgcggctggaaatgataatgcctatcacggcggagccctgagcgatattgctcagcgcaatcagcggccacactggcgtaccacccatgctttgaatcatctgcaaatcaatagcaagcgtggtctggtgtacaccggtgatcaccagcggggcgtacaggaagccaaacaatgctgcgccaatcggagcaaagctgccggtcatcaggtgacgtaccgcaaaggcaacgccatcgccaatcatgcgaccaaacggaccaatcagcgcatgggcgaggaacaccgcgaggatcaggctacagacgggtaccaccaccagatagaggtaatccggcacgatgcgtttaaggcgagtttcaataacgcccagcgccagtccggctaacagtgccgggatcacctgcgcctgatagcctactttggcgatgctgaacatgccaaagtcccacacttccggcagctgctgcccgagcagataagcgttcatcagctgtggagaaaccagtgtcacgccaagcacgataccaaggatcggcgtgccgcccatttttttcaccgcactccagcaaataccgaccggcaggtagaagaagatcgcttcaccgatcaaccacagaaaatcgtagatcgtttgcagggaagggtacatttgcgccagcgtctgaccgttgctcatgggcaaatcgccgatcacattgcgaaaaccgaggatcaaaccgccgctaatcaacgcgggcagcaacgggaagaagatcaccgcgaaatgagagatcaactgctcatgccatttcatattatgccgggcggctttttttacctgctctttatcaacctgcgcctgtccggtactcgcaatcagtgcttgatagtaatcacccacgttggtgccaatcaccacctgaaattgcccggcattggtgaaacagcctttcaccatagggagttgctcaatttctttcggtctggcattggccggttggttgaggacaaagcgtaggcgagtaatacagtggctcaccgtcgcaatattgccgcgcccgccgaccagttcaatcaaccgatcgatatccgtttggtttattttgctcatcataaagccccatggcagatgacatttttggttggctgcagaatatattgcgcggaaaaatttaaaaacgggaacgttcccgaaacgcagcgaagatcacaatttatcgttcaggaaacgatcaggacagggtggcggggatgatgatttgttgcggttcgctgcgcccggttacctgcgcgatcaactggcaagccgcctggcgtccagcttcggcgtaaccgggatctacggttacgatctccggatggaggaatttcattaacggcgtattaccgacgctcgccagttgcaaggtgtcgatgcgttgctcttgcaggtatttacttgcgccaagtgccagcgtgtcggttgcgcacagtaaggcggtagtttcaggcgtaatcacttttgcaacgttctcatagccttgcttcatagcaagccctggcagggcggcaacgggatgcagtttatgcgctttgcagaacgccaggtaggcttcgtgacgtcgcttaccggttgtcacgtcactgtgcggcacgccgagataactgatattacgatgcccctggtcatacagccgttgcatcaggattttgattgccccttcgtcgtcataacagacgctagcaaagccttttgcgtcacgcgccagcagaaccaggctactctgccagtgggctaacatttcttctgttatgccagtaaaaccgaacagcactacgccgtcgatattacgccgtttcagcactcccaaatgttcggcaactaattgcggggaaaactgactttccatcatgattgggtcgtaaccttgttcatagaacgctggcagcatggtttgaacggcgagattttcactcaagctatccagacgggtaacaatgatggcgaccactttatcgctttgcccacgcatagcgcgcgcagagcgggaaggggaaaatccatgctgattcatcactgcttcaacacgctcgcgggtgagctggctcacgccgctttcgttattcagcacccgggaaactgtagatttccccacgccgcttaagcgcgcgatatctttgatggtcagccgattttgcatcctgttgtcctgtaacgtgttgtttaattatttgagcctaacgttacccgtgcattcagcaatgggtaaagtctggtttatcgttggtttagttgtcagcaggtattatatcgccatagatgctacgaatattattggattctccttattatttgcggcgcttttttcacttaccggaggttatatggaacctgatcccacgcctctccctcgacggagattaaaacttttccggtaagcccgtcttttcacggcgttaccggatgcgtaaggccgtgacgttttaacgtccctgctcagctttattaccttcaggtaaggcttcgccacgcctgaagacatttctgtactgtttcagacagtgcggagggactccttatgtttaaagaaatttttacccggctcattcgccatttaccttcccgtctggttcatcgtgatccattgcctggcgcgcagcagacagtgaatacggtggtcccgccgtccttaagtgcgcattgcctgaaaatggcggtgatgcccgaagaagaattgtggaaaacgttcgacacccatccggaagggttaaatcaggcggaagtggaatctgcccgcgaacaacatggtgaaaataaattacccgcacaacaaccgagcccgtggtgggtacatttatgggtctgctatcgcaacccctttaatattttactcaccattctcggcgctatttcttacgccacggaagatttatttgctgcgggcgttatcgcgctaatggtcgctatttctacgttgctgaactttattcaggaagcacgttccactaaagcggcagatgccctgaaagcgatggtcagcaatactgcgacggtgctgcgcgtaattaacgacaaaggcgaaaatggctggctggagatcccgatcgaccagctggtgcccggcgatattataaaactggcggcgggagatatgatcccggcagatttacgtatcttgcaggcgcgggatctgttcgtcgctcaggcgagcttaaccggtgagtctctgcccgtagaaaaagccgctaccactcgccagccggagcacagcaatccgctggagtgcgacacgctgtgttttatgggcaccaccgtggtgagcggcacggcacaagcaatggtgattgctacaggtgccaatacctggtttggtcaactggcggggcgtgttagtgagcaggaaagcgagccgaatgcctttcagcaagggatcagccgcgtcagtatgctgctgattcgctttatgctggtgatggcaccggtggtgctgttaatcaatggttacaccaaaggcgactggtgggaagcggcgctgtttgcgcttagcgtcgcggtaggcctaacgccggaaatgttgccgatgattgttaccagcacgctggcgcgcggcgcagtaaagctgagcaaacagaaagtgatcgtcaaacatctggatgctattcagaactttggcgcaatggatattctgtgcactgataaaaccggcaccctgacgcaggataaaattgtgctggagaatcataccgatatctccggtaaaaccagcgaacgcgtgctgcatagcgcgtggttgaacagtcattatcagaccggacttaaaaacctgctcgatacagcggtgctcgaaggtacggatgaagagagtgcgcgcagcctggccagtcgttggcaaaaaattgatgagattccgtttgatttcgagcgtcgccggatgagcgtggtagtggcagaaaataccgagcaccatcagctggtttgcaaaggtgcattgcaggaaatcctcaatgtgtgtagccaggtgcgtcacaatggcgagattgtgccgctcgatgacatcatgctgcgtaagattaagcgggttactgatacgctgaatcgtcaggggctgcgcgtggttgcggtggcgacgaaatacctgccagcgcgtgaaggagattaccagcgggcggatgaatccgacctgatcctcgaaggatatattgcttttcttgatccgccaaaagagacaaccgctccggcactgaaggcattaaaagcgagtggaattaccgtaaaaatccttactggcgacagtgagttagttgcagcgaaagtgtgccatgaagtggggctggacgcgggagaggtggtcattggtagtgatattgaaacgctatctgacgacgaactggcaaatcttgcacagcgtaccacgctgtttgcccgcctgacgccgatgcataaagaacgcattgtgaccttactgaagcgcgaagggcatgtggttggctttatgggcgatggtattaatgatgcgcccgccttacgcgctgcggatatcggcatttctgtggacggcgcggtagatattgcccgtgaagcggctgatatcatcctgctggaaaaaagcctgatggtgctggaagagggggttattgagggacgtcgcactttcgccaacatgctgaaatacatcaaaatgacggcgagctctaacttcggtaatgtgttcagcgtgctggtagcgagtgctttcttgcccttcctgccgatgttgccgttacacttgcttattcagaacctgctgtacgatgtgagtcaggtggcgatcccgtttgataacgtcgacgacgagcaaattcaaaagccgcagcgttggaatccggcggatctggggcgctttatgatcttcttcggaccgatcagcagcatcttcgatattttgacgttttgcctgatgtggtgggtattccatgccaacacgccggaaacgcaaacgctgttccagagcggatggtttgtggtgggcttactgagccaaacgctgattgtgcatatgatccgcacccgccgtgtgccgtttattcagagctgtgcaagctggccgttaatgatcatgaccgtgatcgtgatgattgtcgggatcgcattgccgtttagtccgctggccagttatctgcaattacaggcgctgccgttaagctatttcccgtggctggttgcgattctggcagggtatatgacattaacccagttggtgaaagggttctatagccgtcgttacggctggcaataaagaataaactgggcacgatagccccgattcagattgtagacaaagtgagttttgttcatgccggatgcggcgtaaatgccttatccggccaacaaattcaataaattgcaggaatcacgtaggcctgataagcgtagcgcatcaggcgattttgcgtttgtcatcagacttaatccgggcatgatagcccggatttccatcaagattagcgacgaacagcgatcgcttcgatctcaatcttcacgtctttcggcagacgggcaacttcaacgcaagaacgtgccgggaaggtggcgttgtgttcggtgaagaaggcttcgtaagtggcgtttacggttgcgaagtcgttcagatcttttacaaacacggtagttttaacgatgtcgcccactttcaggccagcggcttcgacgatcgcttttacgttatccaggctctgacgtgcctgtgcagcgacgtctgccggtacttcgcccgttttcggatttaccgggatctgaccggaggtgatgatcatattgcccagatcaacgccctgtacgtaaggaccgatagctgccggtgcattttccgtcgcgatagttttgctcatgatttctcctttattacagcggtaaaaagtctggctcattatagggagccagacttttattaccaaccgcaattaattggccagcaccacattatgggaaaactctttttcacagtatttgcatttgagcgcgatatcattggcgcgttttcgcacggcaaagctggaactaaccggttcggcatggctgatacagttgctgttcgggcagaccagcacattgtcgatgcgctccggcagacttgggcggcttttacccaccacttcatagttgtcgatacggttaaccgtggcttgcggcgcatacaatgccagttgatctacttgatcttcactcaaaaaggtattttcgattttgatcagatctttgcggcccatctcgccagaaggcaggttcagaccaatggtgatgcgctgatccgtttcggtcagcttgaacagactcaacagcttaaaaccgatctgggcggggatatggtcaattaccgtgccgcgtttaatagcttcaacctgcaatttattatcgtgtgtcatctctatttccccttacagtaccagatcgcgattcagaaccagtgccagtaacgcctggcgagcgaaaatcccgttgcctgcctgctggaagtaccaggcgtgtggcgttttatcaacatccgtcgcaatctcatcaacacgcggcagcggatgcagcactttcatattggctttggcgttgtggagatcgctggcgcgaagaacaaactgcgctttcacgttggcgtactcggacgggtccagacgctctttttgcacgcgggtcatgtacaggatgtctacttccgccatcacttcttcaatagagctgtgcagactccatgcgatccctttttcatcgagcatatccagaatgtattgcggcattgccagcgcgtccggcgcgatgaagtaaaaacggttgccgtcgaacttcgctaacgcctgagtcagggagtgaacggtgcggccatatttcaggtcaccaaccattgcgacgtggagattgtccagacgcccctgggtttcctgaatagtgaataagtccagcaaggtttgcgtcggatgttggttggagccatcaccggcattcagtaccggtacattgccggaaaactcggtggccaggcgcgccgcaccttcctgcggatgacgcatcactatcgcatcgacgtaagtgctgataacgctaatggtatcggccagcgtttcgccctttttacccagacttgtattggcgctgtcggagaagcccaccacgctggcccccaggcggtgcatagatgtttcgaaagagaggcgggtacgggtagaggcttcgaagaaacagctggcaatgactttgtgcttcaacagctctggttgcgggtttgctttcagtttcgccgctgtcgccagcaccagattaaggtcatcgcgactaaggtcgtttatggaaatgatatgtttctgatatagcggattagccatcttttatctcctgacgcctgggcaaaaaaaagcccctcgattgaggggctgggaatgggtgatcaacgggaagaaaaacggcaggccagcgtcttttttcagacgcggtaagacaaaatgtcgaacacactgaaccatacatcctcccggcaaattgtccggcattatactcatcgtcagaagcggcgcaagcatttgatgcaatattttgtcagcgcaaacggtttatttgaattaaaagtcaaggtatatgcatttttatttgatgtgattctgcaggggaactgtccttcggtatcaataattgcagacattccctgctttttcctttttcactttcacgcaatcagatatgcattttattccattcatccgacttatagggcggagtgtgaaagcgaacggctaacactattgcttactgctcagggatgcgcgctatcactttaatttcaaaatcaaagcctgccagccatgtaacacccaccgccgtccagtttggataaggtggggcgctaaatatttcatttttcaccgtcatgatgtcttcaaattggttttctggatcggtatggaagctcgtaacatcaatgatatcgtcaaaagtgcatcccgcagctgccagggtcgcatgcaaattatcaaatgccagtctgacttgttgctgaaaatcgggttctggtgttccgtcctctcgacttcctacttgcccggaaacaaacagcaaatcgccggaacgaatagccgcagaataacgatgctcagcatatagactatgtcggccagcagggaaaacagcggttctttctaccatttggttatcctcaagatttacgacatgaacagaagatttctctttaccgggagccgcttttagcggacgacgtgagtaaacaaaacccagacatcatggataatggctgggcttaattgagcgtagtcggttatgcgccaaacgcgccatcaatggtatgcatcgcgccggtaacaaaactggcttctggccctgctaaccatgcgaccataccagcgacctcttccggttgcccatgtcttttgatagccatcaaactatgcaacatatcgcgcattggcccgttggcgggattagcgtcggtatcaattggccctggctggacgacgttaatggtgatcccacgcggtccaaaatcacgggccagcccgcgcgccatgccttgcagggcagatttgctggcggcataagcagccatgcctgcaacaggcatacgatcgccattcacggagccgatgattaagatgcgcccgccttcgggcatctgccgggcggcttcaacagaggcatgataaggagcatgaatattgattttgaaaaggcgatcaatatcgtcggcatttaattccagggcctcgccaaagacgccaatacctgcatttaccaccaggatatccaatgcgccgctcttacgaacgacatcaatgacagcgtctctgtcagcactatctgtgaatactgctgtcgctccagtctcttgtgccaggcgtttagcggcatctttgctccccgcataggtgaatcgtacattggccccatcggtgacgaaacgacgtacgatagcggcaccgataccacgactgccaccgaggatgagaactgtcttacctgtaaaagcgcccataaggactccttgatttattatgtaacatgcattacaaaactgttttaactttctgtcaacaggttttgtaatggtcactaaaaaacaatctcgcgttccaggtcgtcccagacgtttcgctcctgagcaggcaatctctgcggcaaaagtgctttttcaccaaaaaggtttcgatgctgtcagtgttgctgaagttactgattatcttggtattaaccccccgagcctctacgcggcttttggcagtaaagctgggttatttagccgtgtactcaatgaatacgtcggtacggaagctattccgcttgccgatattcttcgtgatgatcgtccggtaggcgagtgcctggttgaggtattaaaagaagcggcgcgcagatatagccaaaacggcggctgcgctggctgtatggttcttgaaggtattcatagtcatgatccacaagcgcgtgatattgccgttcaatattatcacgccgcagaaacgaccatttatgactacatcgccaggcggcatccacaacgcgcacaatgtgtgactgattttatgagtaccgtgatgtctgggctttctgcgaaggcacgagaggggcactctatagaacaactctgtgcaacagctgcaatggcgggggaagcgataaaaactattcttgaggagtgatgcgggccttgacccgaaaggcgggaaagcgcctgccgataagttgtgataagacaataattcacgcgttaaggctagcggaattgattatcttttcgtataacgatagaaatgaaacgttgttttaattaaggagtggaaaagatgatcatcggaaatattcataatcttcagccgtggctaccccaggagttacgccaggcgattgagcatatcaaagcacacgttacggcagaaacgccaaagggcaagcacgatatcgaaggcaatcgactgttttatcttatcagcgaagatatgaccgagccgtacgaagctcgccgtgcggagtaccatgcccgctatcttgacattcagattgtgttaaaaggtcaggaaggcatgaccttcagcacgcaacctgcaggcgcgccggataccgactggttagctgataaagacatcgcatttttgccggaaggcgttgatgagaaaacagttattctaaatgaaggtgattttgttgtgttttatccgggggaagtgcataaaccgctgtgcgcagtgggcgcgccagcccaggttcgcaaagcagtagtgaagatgctgatggcgtgatgacttttcgccgtaaataactcaaggtttacggcgagtttgtgaaaagagcgttttttgatatttttttgtgagtaaaatttgtaatgcttagacgttcttattcactcaaggagttcgtcatgagcaaaataagtgatttaaattattctcaacacattacattagccgacaattttaaacaaaaaagtgaagttttaaatacctggcgtgttggaatgaatgattttgcccgtattgccggggggcaggataacagaaggaatattctttctcctggagcatttttagagtttttggcaaagatatttaccctgggttatgtggattttagcaaacgctccaacgaagcgggtagaaatatgatggctcatattaagtccagttcttattctaaagatactaatggcaatgaaaaaatgaagttttacatgaataatcctgtaggggaacgagcggatagtcccaaggtgattatagaaattagtctttccactatcactactatggggactcgtcaaggacatacagccattatatttccacaacctgatggtagcactaaccgttatgaagggaagtcctttgaaagaaaagatgagagtagtttacacctgattactaacaaggttctggcgtgttaccaaagtgaagctaacaagaaaatagcgcgtctattaaataataatcaggagttaaataatctacagaaattaaataatctacagaagttaaataatctactgaagttaaataatatacaggggttaaataatcctcaggagttaaataatccgcagaatttaaatgattctcaggagttaaataacagccaggaattaaatagtccacaggagttaaatgatccgcaggagttaaataattctcaggacttaaataactctaaggtgagttgtacagttagtgttgattctacgattacgggtttattaaaagaaccattgaataatgcattattagcaataaggaacgaacatctgctattaatgcctcatgtatgtgatgaaagcattagttacttactgggcgaaaaaggtatacttgaagaaatagataagctctacgcattaaatgatcacggaattgataatgacaaagtaggtaacaatgaaattaatgacatcaaagttaacctgtctcatattcttattgattccttagatgatgcaaaggttaaccttacaccggtcatcgatagcattctggagacttttagtaaatccccatatattaatgatgtaagaatactggattggtgttttaataaaagcatgcaatattttgatgatactaaaaagataaagcatgcatgctccgtaataaatcatattaatcttcgcagcgatcagtctaaaatagctgagacattatttttcaatctcgataaagaaccctataaaaatagccctgaattacaggggttgatttggaataagttggttgtatatgtcaatgaatttaacttaagtaatcgagaaaaaacaaatttaatacaaaggctatttgataatgttgagtctatatttaatgaagtacctgtcagcattttagtgaatgatatttttatgaatgatttctttatgaaaaatcctgagatgattaattggtacttccctcagttacttaagagttatgagggtgaaaagatttattttgataatttaaaatatgatttaaatgataatgataaggaatctaataaagaaattttgaagaatcaaccagataatgttatcaaagaaaaactgaataatgaatacaaacttagatttagaatgatgcaaactatcttgcaaagcagagttaatgtattaccatatattaatgaacagcgtttaaataaactaaatccaccggaaaatttacgtatagcaatagaacactttgggtggaagaatagacctatcactgcataaaataatgtgatgccgggatggtttgtatttcccggcatctttatagcgatagcaattatttactgagcgtcgcgaccatcaccgctttgatagtatgcatacggttttccgcctgatcaaaaacaatgctggcggcagattcgaagacctcatcagtgacttccataccgccatgtaggccaaattcttccgccattttcttgccaagcgtcgtttggtcgtcatgaaacgcgggcaggcagtggaggaatttgacctccgggttaccggtcaactgcatcatcttgctgttcacctgatattcacgcagcaatgcaatccgttccgcccatttctcttttgcttcccccatgctcacccacacatcggtatagataaagtcagcaccttcaactcccttcgcgacatcttcagtcagcgtaatattcccaccattttgctgtgccagggcgcggcattccgtaaccagcgcagcttccggccagcacgcttgtggcgcgaccagacgcaaatccagaccggtaagcgccgcagcttcgagcatgctattgcccatgttgttacgcgcgtcacctgcatagaccagcgtcatttcgttgaacgctttgccgggcaaatgctcctgcatggtgagaagatccgccagcagctgcgtgggatggaactcattggtcaggccattccataccggcacgctagcgtattccgccagtgtttcgacaatctcctgaccatagccgcgatactgaataccgtcatacatgcgaccaagcacgcgggcagtgtctttaatgctctctttatgaccaatctggctgccgcttgggccgagataagtaacgcgagcaccctggtcatatgcggcaacttcgaaagagcatcgggtacgagtgctgtctttttcgaagatgagcgcgatgtttttaccagtgagtttggcttcttctttaccgcttttcttatcggctttcagcttcgcggctaactgcagcaggctgttgagttcagctggcgtgaaatcgagtaatttcaggaaatgcttatgataaaacccggacatagatccctcctgtggctaacgcctcaatgaattaaaattcaatttatatggatgattattcatttgcaagtctaaagcataaatctttgtcacaaaggtggaggcaatgtcagtggtgtgtgacaataagagtatcggcaggacattaagaggaatgagccatggcaaacccggaacaactggaagaacagcgtgaagaaacacgtttgattattgaagaattactggaagatggcagcgatccggacgcgctgtacaccatcgaacaccatctttccgcagacgatctggaaaccctggaaaaagcagcagttgaagcgtttaaactcggttacgaagtgaccgatccagaagagctggaagttgaagatggtgatatcgtgatttgctgcgacatcctcagcgagtgcgcgttgaatgccgatctgatcgatgcccaggttgaacaactgatgacgctggcagagaaatttgacgttgagtacgacggatggggcacttactttgaagatcctaacggcgaagatggcgacgatgaagattttgtcgatgaagacgatgacggagttcgccactaattaagcgtagcgcatcaggcccaggtagttcctgcaacctggtgaatttgtagcccggataaggcattcatgtcacatccggcataaacaaaacgtacgttgttaatgttcgaatgcccgcgagttgaacacgcgggcatttttttagagttcgcgcaacatccgcacttcacaatcgacatggcccgtgcagccaagcgcatagtcgatatgctcaaagcccaaatgctcataaagcgcaatggcttcctttaaaaaagcggtcgtttccagatagcagcgtttgaaacccatctctcgcgcctgctccatcgccattaaggccagtttttttgccagccctttgccgcggatagccggaagaaaatacatcttttgcagttcgcaaatatcgctctcactcccggttaatggcgctatcccaccgccgccgaccacttcaccctcgtactcaacgacccaatatgcatggccaggctgactatatacttgatacagctcgtcaagattcggatcggcgacggtgtagcctttatcagcggtaagaccgtattcggcggatacctgacgaatgacgcgggcgatagcaggattatcctgcagcgtcaggcgacgcattacaggactttgcggcgcaatgttattcatagtttaacccaataaaaataaagtaattatacatttgtttaataccactctcttcttacgtacgcaagcgacttataaagtaataaagtttttgccagcctattactgataagagtattgtaacgtggcagaacattttactgtctgtatatataagttatatcaatggattttttaattcagggaatttttatggctcaagttattaatgaaatggatgttccgtcccatagctttgtttttcatggtacaggtgagagatattttcttatttgtgtggtgaatgtgttgttaacgattataacgctaggtatctatttaccatgggcattaatgaaatgtaagcgttatctttatgctaatatggaagttaacggacaacgattttcttatggaattaccggtgggaatgtttttgttagttgtcttttttttgtttttttctatttcgcaatcttaatgacagtgagtgcagatatgccgcttgttggttgtgttttgactttgttactgttggttttgcttatatttatggcagcaaaaggactgcgtcatcaggccttaatgaccagtctcaacggcgtaagatttagttttaattgctctatgaaagggttctggtgggtgacctttttcttgccgattttaatggccattgggatggggactgttttctttatcagcacaaagatgctacctgccaatagtagtagtagtgttattatatccatggttctgatggcaatagttggtattgtttccattggtatttttaatggtactttatatagtctggtaatgagttttctctggagtaataccagtttcggtatacatcgtttcaaggtgaaattagatactacgtattgtataaaatatgccattctcgcatttttagctttattgccttttctcgctgttgctggttatattatcttcgatcaaatattaaatgcgtatgatagttctgtatatgcaaatgatgacattgagaatttacagcaatttatggaaatgcaacgtaaaatgataatcgcgcagttaatctattattttgggattgctgttagcacaagttatttaacggtgtctttgcgaaaccattttatgagcaacctgagtctgaatgatgggcgtattcgttttcgcttaactttaacgtaccacggtatgctttatcgcatgtgtgcgttggtggtgatatccgggattacgggcggtctggcttatccactgctgaaaatatggatgattgactggcaggcaaaaaatacgtatttgctgggcgatttggatgaccttcctttaatcaataaagaagaacaaccagataaaggcttcttagccagtattagtcggggagttatgccttctttaccatttctgtaagagataaaaaaggccggagcatgctccggccttcgttttcatcactgtgttttgattacagcgcggcgataacagcctgctgttcaatcagtttcgctttcgcttccgcatagccttccagcttctcacgctctttcgcgatgaccgcttccggtgcgcgggcgacaaagccttcgttcgccagtttgttctcgatacggctgatttcaccttcaatcttcgccacttctttcgccagacgcgccagctcatcttctttgttgatgaggccagccatcgggatcagcagctctgcaccgtcgatgatcttcgtaacggaaaccggacctttgtcatcggcaggcagcacggtgatactttccagacgcgccagggtttgcaggaagccacggttttcatttacgcgacgttctgcatccgcgctgcaaccacgcagcagcagctccagcggtttgcccggcgcgatgttcatttctgcacggatgttacgtaccgcaacgatcgcctgtttcagccattcggtgtcggccagtgcggcttcatcaacctgagatgcatcgtactgcgggaacggctgcagcatgatggtgtcggcagtgataccgcaaagtactttcacacgctgccagatggtttcggtgatgaacggaatgatcggatgcgcgaggcgcagcagaccttccagtacagtcaccagcgtatggcgagtaccgcgcagttctgcttcggtgccaccgttcattaccggcttggtcagctcgagataccagtcacagaactggttccaggtgaactcatacagaatgcctgcggcgatatcgaagcggaagctgtccagcgcttcgcggtacgctttgatggtctggttgaactccgccagaatccagcggtccgccaggctcagcgtcatttcgccgccgttgaagccgcaatcctgaccttctgtgttcatcagcacaaagcggctggcgttccacagcttgttacagaagttacggtaaccttccagacgcttcatatcccagttgatgtcacgaccggtagacgccagcgccgccagggtgaagcgcagcgcgtcagtaccgtgcggctcaataccgttcgggaactgcttctcggtgcgcttacggattttgtccgccagctgcggctgcatcatattgccggtacgtttttccagcagttctggcaggctaataccgtcaaccatatccagtgggtcgataacgttacccttggatttggacatcttctggccttcgtcatcacgaatcaggccggtcatgtaaacggtgtggaacggcacctgcggtttgccattttcatctttgatgaagtgcatggtcatcatgatcatgcgggcaatccagaagaaaatgatgtcgaaaccagataccatcacgctggttgggtggaactgacgcagggcgtcggtattttccggccagccaagggtagagaaggtccacagcgcagaagagaaccaggtatcgagaacgtcttcgtcctgacgcaggacaacatcagcaccgaggttattttctttacgcacttcgtcttcgttgcggccaacataaacgttacccgcttcgtcataccatgccgggatacggtgaccccaccacaactgacgagagatacaccagtcctgaatatcgcgcatccaggagaagtacatgttttcgtactgcttcggtacgaactgaatgtcgccgttctcaaccgcttcaaccgccggtttcgccaggacatcggcacgcacgtaccactggtcggtcagcattggttcgataactacgccgccacggtcgccgtaaggaacggtcaggtcgtgcggtttaatttcttccagcaggccaagcgcgtcaactgcggcaacgactgctttacgtgcagcaaaacgctccagtttctggaactctgcagggatttcgctggaataaacgtcagattcgttacctttggtatcgaacacctgggcgctttcacggatatcgccgtcaaaggtcaggatgttgatcatcggcagggcgtgacgtttacccacttcatagtcgttaaagtcgtgcgccggagtgattttcacgcagccggtgcctttttccatgtcggcgtgttcgtcgccaacgatcggaatacgacggttaaccagcggcagaatgacatatttgccaatcagatctttgtaacgcggatcttccgggttaacggctacgccagtatcgcccagcagggtttctggacgggtagtcgcgaccaccagataatctttaccgtctgcggttttcgcaccgtcagccagcggatagcggatgtgccacatgctacctttgctttcgcggttttcgacttccaggtcagagatagcggtgcgcagtttcggatcccagtttaccaggcgtttgccacggtaaatcaggtcttctttatacagacgaacgaaaacttctttcaccgcattggacaggccttcgtccatggtgaagcgttcacgctcccagtcgacggagttgccgagacggcgcatctgacgggtaatggtgccgccagattccgctttccattcccagattttgtcgatgaaagcttcgcggccgtagtcgtgacgggttttaccttcttctgcggcaatcttgcgctcaacgaccatctgggtagcgatcccggcgtggtcagtaccgacctgccacagggtgtttttgccctgcatgcgctgatagcggatcatggtatccatgatggtttgctggaaggcgtgacccatatgcaaactgccggtgacgttcggcggcgggatcatgatgcagaaactttcctggctttcatcgccattaggcttaaagtagccctgcttttcccagtgctcgtaaagcggctgttcgatatcttgtgggttatatgtcttttccattatttccaggttgccgtattcaggttgaaaccagccacgcggtaggctttatagcgttcgcgcgccagttgtttcagagaatcttcataaggaacgaagtctaccacttctgtgaaagcggtggcaaaatctgcaaagcttgttcgcagactaatcaatatatcgcgccggctgctgctacgcttttgcggccaggcgatctccaccggtgcaccgccgcgcggtccttctcccgctaaattatgcggaacaaagctttctgccggacgcgcccacagggcttcatccagccggtaagcctgcttttcatcttcacaggcgatgagcacgcgcttaccgctgcgccaacgttctgcggcaatttcacacaccagttgctcaacggcgcttaagccatcgacggtggtgtcattgtccagaaggtagaacgtcgcgtttttcataaatggggcttcttgtggtggatttaaatacgcatcaggtatacaccgcagcgcctgatgcgacgctgttgtgtcttatcaggcctacgagttcagtgctgtgtaggtcggataaggcgttcacgccgcatccggcaataacagccttgcctgacgcaattactcttcgccgttaaacccagcgcggtttaacaggaactgtgccagcaacgctaccggacgaccggtggcgccttttgctttaccagaacgccaggcggtaccggcgatatccaggtgcgcccagttgtacttacgggtaaagcgactcaggaagcaacctgcggtaatcgccccaccaggacgaccgccaatgttcgccatatcggcaaaattggactccagttgttcctgatactcgtcacccagcggtaagcgccatgcgcggtcaccggattgttcagacgcggcaatcagttcatgggccagcggattatggttcgccatcagaccagtaatatgatgacccagcgcgatcacgcaggcaccggtcagcgtcgccacgtcaatcaccgcttccggctcaaaacgctcaacgtaagttaacacgtcgcacagtaccaggcggccttcagcgtcggtgttcagcacttcaacggtttgaccggacatggtggttaacacatcgcccggacgataggctcgtccgccaggcatgttttcgcagcctgccaacacgccgataacgttaatcggcagttgtagctccgcgaccatccgcatcacgccgtaaaccgctgccgcaccgcacatatcgtacttcatctcatccatgccttcactaggcttgatgctgataccgccggagtcgaaggttaaacctttacccaccagcacgattgggcgtgcatcttcgctcgcgttgcctttgtactcaatcacgctcatcaggctttcgttttggctaccctgaccgaccgccagataggaatgcatccccagctctttcatctgctgttcgccgataacgcgggtgatgacattcttgctgtagctgtcagccagctggcgcgcttgactagcgaggtaagcggcgttacagatattcggcggcatattgccgagatcttttgctgctttaatcccggcggcaatcgccagaccgtgctggatcgcgcgctcaccgctggtcagttcacggcgggtcggcacgttgaacaccatcttacgcagcggacgacgcggttcgctcttgttcgttttcagctgatcgaaactgtagagcgtctcttttgccgtctcgacagcctgacgcactttccagtagttgttacggcctttaacgtgcagctcagtcagaaagcagaccgcttccatactgccagtatcattcagcgtattaatggttttctgaataacctgcttgtactgacgctcatccagctcacgttctttgccgcaaccaataaggagaattcgctcggaaagtacattcggaacatggtgcagcaacaatgtctgccccggttttccttccagttcgccccgacgtagcagggcgctgatgtacccatcgctgattttatcgagctgttctgcaatcggagaaaggcgacgtggttcgaagacgcccacgacgatgcaggaactccgctgtttctccgggctaccgctttttacactaaactccatgcactacgctcctgaatcttaaagacaacggcggtggctacagatagaattgcaagctttcgtaactcatgtccgctgttgcgatgacttcgtgttaatcttaacgttattacggcattggcacgtcagaacaaaatctgagaggtgaatccgttgagtataattatcttagcgacgatttcgacgactcaagagaataaatgacgtttaagccatgaaacaagctaaaatcctgcaaaagacgagtttttacgggcgtatttaaagtgataatcataagatatctggtgcgggagacgctcaaaagccagctggcgatactcttcatcttgcttttgatcttcttctgtcaaaagttagtgaggatcctcggcgcagcggttgacggcgatattccggcgaatctggtgctctcccttctcgggttgggcgtgccggaaatggcgcagcttatcctgccattaagcctgttcctcgggctgctgatgacgctgggcaaactgtataccgaaagtgaaattacggtaatgcatgcctgcggcctgagcaaagcggttctggtgaaagcggcaatgatccttgcggtattcacggcaatcgtagcggcggttaacgtgatgtgggcgggaccgtggagtagccgtcatcaggatgaagtgttagcagaagcgaaagcgaaccctggcatggcggcgctggcgcaagggcaattccagcaagcgactaatggcagcagcgtgctgttcatcgaaagcgttgacggcagcgatttcaaagatgtgttcctcgcgcaaattcgaccaaaaggtaatgcacgtccttctgtggtggtggccgattccggacatttaacccagctgcgcgacggctcccaggtcgtcactctcaaccagggaacgcgcttcgaaggcactgcattgttacgtgatttccgcattacggacttccaggattatcaggcgatcattggtcaccaggcggtggcgctcgacccgaacgataccgaccagatggacatgcgcacattgtggaacactgacaccgatcgtgctcgcgcagaactgaactggcgtatcacgttggtattcaccgtgtttatgatggcacttatggtcgtaccgctgagcgtggttaacccacgtcagggacgcgtactgagcatgctgccagccatgctgctgtatctacttttcttcctgatccagacctccctgaaaagcaacggcggtaaaggtaagctggacccgacgctgtggatgtggaccgttaacctgatttatctggctttagcgattgttctcaacctttgggacaccgtgccggtccgccgcctgcgcgccagttttagccgtaaaggagcggtgtgatgcaaccttttggcgtacttgaccgctatatcggtaaaactattttcaccaccatcatgatgacactgttcatgctggtgagcctgagcggcattatcaagtttgtcgatcagctgaaaaaagccgggcaggggagttacgacgcgttaggcgcaggaatgtataccttgctgagcgtgccgaaagatgtgcagatcttcttcccgatggcggctctgcttggggcgttgcttggtcttgggatgctggcgcagcgcagcgaactggtggtgatgcaggcttctggttttacccgtatgcaggtggcgctgagcgtgatgaaaaccgccattccgctggtcttgctgacgatggcgattggcgaatgggtcgcgccgcagggcgagcagatggcgcgtaactaccgtgcgcaggcgatgtacggcggcagcttgctctctacccagcaaggcttatgggcgaaagatggcaacaacttcgtctacattgagcgggttaaaggtgacgaagagttaggtggcatcagcatttatgcctttaacgagaatcgtcgtctgcaatccgtacgctatgccgctactgcgaagtttgacccggaacataaagtctggcgtctgagccaggttgatgaatctgatctgaccaatccgaaacagattaccggtagccagacggtgagcggcacctggaaaaccaacctcacgccggacaaactgggcgtggtggcgctggacccggatgcactctctatcagcggtttgcacaactatgtgaagtatctgaagagcagcggtcaggatgccggacgttatcagctcaacatgtggagcaaaatcttccagccgctatctgtggcggtgatgatgctgatggcgctgagcttcatctttggcccactgcgtagcgtaccgatgggcgtgcgtgtggtcaccggtatcagtttcggttttgtcttctacgtactggaccagatcttcggcccgctgacgttggtttatggcatcccgccgatcatcggcgcactgttgccaagcgccagcttcttcttaatcagcctgtggctgttaatgagaaaaagctaaccgaatgaacgaataaagggagcgaaagctccctttattattgttagcaaagtgtgcttcgttcattcctgaaaaataattaaaattcaatatattgcagtggggtgggcatgataagacgcgccagcgtcgcatcaggcaaagacaaatctcgcctgacttaccttcttctcccccccagcaaactccccaacatcccgcgtacaatctgattcgtcacttggcgagcggcgcttttggccattgtttgcaccacaccatctttcttcccgccgcgtggtccggtagtgccgaacaaaatatccttcaatccaccaagaatgccgtcatccaccgctacctctttccctttcgcgggaggattattttgctgctcggtactggcctgaaagcctttttgcaacatctcataggcggattcccggtccacctcatcctcatatttgccatacaccggagagtgattaatcaagccattacgctcatcttccgtcaccggccccatccggctacaaggcgcgatcaccatcgcacgctccaccacagaagggcttcctttcgcatccagaaaagagatcaacgcctcgccggtgcccagttcctgaatcgccttttcggtatcaaacgccggattggcccgcatggtttgcgccgctgccttcactgctttctgatcttttggcgtaaaagcccgcaaagcatgttgaacgcgattaccgagctgcccgagcacattatccggaatatcagacgggttttggctaacgaaccagacgcccacgcctttactgcgaataagccttatcacctgctcaatcttatccagcagtacctgcggggcatcgttaaacagcagatgtgcctcgtcgaagaaaaacaccagttttggtttctccagatcgcccgcttccggcaattgttcatacaactcactaagcatccacagcaggctggcggcgtacagtttcggcatctgataaagtttctcggcgctgaggatattgataacgcctttaccgttggcatcggtgcgcatccagtctttgatatccagcatcggctcaccaaagaagtgtgctgcgccttgctgttccaggctcaacagcccgcgctggatggcaccaacgcttgcgctactgatattaccgtactgattctggaaggatttggcgttatcgccgatgtactgggtaattgcccgcagatctttaaagtcgagcagtaacagcccctgatcgtcagcaatgcggaagatgatattcagcacgccagattgcacatcgttgagattcaacagtcgtgccagcaacagcggccccagatcgctaaccgtcgcccgcaccggatggcctttctcgccaaagatatcccacaccaccaccggattggcatgcggttgccagtcattgacgccgatatttttaagccttgcgagcagtttttcgctcaccgttcctgcctgcgcgacgccggtcagatcgcctttcacatcagccataaacaccggcacgccgatttcgctcaaactctccgccagtttttgcagcgtaacggttttacccgtccccgttgcgccggtaatcagcccatgacggttagccattcccggcagtaaaaacagttctgtgtccggcgtgcgggcaattaacaggggttcactcatgagatatcctccagtttcctgcctggagtataggcaacgtccggcaaagagaatacgtgtaatgaagagaaaataacttaaagcgtgttgccgtgataaatctgatacccgaggtcaacagtgttgtggttgtgatcgttatttttaattttgctcagcaacatttgggcggccatccgaccaatatcaaaacggggagtaattacgctggcgaggcttgggatcatttgcctgccaatctccagcccatgaaaacccgcaatggaaatttgttctggcacggcgaggtttcgctcgcggcacagcagaagcgcacccatcgcaatatcgtcattggtgcaaaatacaccgtctaaatccgggtttgcgctaagggcatcacgcattaactgcattcctaaatgaatggaactgatggcgcgtggattcatgcgtaatggggaaagattatgcagcatcatcgcatcgcaatacccctgataacgctgttcatcgcgggtgtcatctttggaaccgagatacagaattttgtgcctgactcgcttctccagcatggtacacaccatgtcaaaagcggcctgccgattatcaaaaccgacctccatatccagccgttctccctgtacatccatcaattccacgaccggaatggtggcactacgcagaaatttcaccgtcctgatggtgtgatatttttcgctaagtataatcccgtcaatgttataagagagcaggttaatcacgctctcttcttcggaatcgcgatcgtaattgtaattagcaataagggtctgataattatgctcagaggtgacggattctattcccgcgagaatgtcagcgaagagttgattttgaaaactcggaatcaagataccgagggtataactttgtgcattcaacaacatgccgggagcgcgattagggatataattgatctcttccataattttggcgatgcgctcgcctgtttcctttgccacctttttcgggctgcggatataacgactcacggtcatttttgttacgccagccagcgtagcgatatcctgtaaagaaattctgtgattgcgcataacttctcccaacgtcgggggaatcttcaatcttcccccgaaactacatcacaatattttattctttcagtgcaatacggcgttaatggctaacacgcccagcaaacccataatagaaataagggtttccatcaccgtccaggtacgcaacgtttcaccaaccgtcagattaaaataccctttaaatagccagaagccagggtcgtttacgtgactcgcgatcacgctgcccgcaccggttgccagtaccattaaagcgggatcggcatgggtaacgttgataatcggcaacaccacacccgcggtggtaatggccgcgacggtggcagagcccagagcgatacgcaacagcgccgcaacagtccagcacatcaataacgggctaagtgtagttccggtcattaagtgactaatatagtgcccgacaccgctatctactaatacctgcttaaacgcgccgccgccagcgataataaacacaatcatcgcgatagcgcctatagaatccccaatgatatccatgatttgctcgatggtgcgtccattacgtcggcccagtgtgaaaatcgcaataacaatggcaataaacagcgcaacggcagggttaccgacaaattcaaagaagaggcgcacggtgttagttttcggtaacgtaatttcacaaacggcggcgatagccatcaggatgaccgggatcacggcagcgaaaatactgttccagaaggagggcatctcctcttcgctaaacagatgaggattaaataagccttccggtggtgctttctcaaagcgagttagcagtttagaaaacagcggtcctgcgacaataactgtcggaatggtaatgataaatccatacagtaaagtcgttccgagattagcctcaaagatagtcgcgatggcagtaggccctggatgtggcggcagaaaacagtgggttacagagagcgctgctaccattggtacgccaacatacaacaggggtaatccactacttgctacgatggtaaataccaacggcaacagcaggacaaaacccacttcaaaaaacatggcgaggcccacaaccagaccggtgatcactagcgcccattgcacgcgttttttaccaaaagtagcaatcagcgtagtggcgatacgttgtgccgcacccgtatcagaaatcagcttgcctaacatggccccgaaaccgaggatcattgccagcccgccgagcgtgctgccgataccattttgtatagagtgcaggacggcctgtgcatccatcccttcggcaaatccgacgacggcagctaccagaacgagggcaataaagccgttaactttaaagccgatcatcaggataagaagcagcgcgacgcctgccgcaataatgattaatggcatagtctttatctcttattagtgccagaaaagcagcgctttcgcgctgcacgtaggggggctgttaaacagccactaacatgccgccatcaacaaacaacaggtggccgtttacgaaatcagaggctttactagaaaggaacaccgcagcaccaatcagttcctgcggatctccccagcgtgcggcgggggtccgtttgcacaaccaggcggtgaaggcttcgtcctcaaccagtgctttagtcatttctgttttgaaatagcccggcgcaataccgttgacctgaatattgtggcgcgccagctcgacgcacatgccgcgggtgagcatttttaccgcccctttgcttgcggcataaggggtgatggtgtcacgtcccagttcgctttgcatgctgcaaatattaataactttacctgccttgcgttcaaccatgtgacgagttaccgcttggcttaccaggaacacggcggtctggtttactgcgatcacatcattccactcttgttcagggaactcagtaaaaggatgacggcgctggataccggcgttattcaccagcacatcaatggggccgatgtccttttcgatatgttcaacggcggcatcaatttcatgtttatgagtaacattaaaaggtgcggcaacggcctgaataccctcctggtggagtttttctacagcaagttctgcgcgttcggcagtaatatcattaataattatttgtgcgccatatttacccaggccggttgccagtaaaaagccaatgccctgtgcactaccggtaatcaagatattttttcctgccagactaaatagatcgttcattgtattattcctttatttatctcttagaaaacaagctggacttttgctgcctgggttttatcaccggcgaaacgtagcgcctcttccaggtcagtgaagggatattcagcactcagtaaaggcagtggattgataacgccattcgccagccaactcactgcggtattaaattcgctggtaaaacggaaagagcctctgagactaatctccttaccaatcaacgtcatcattgggaattctgccatcgcgcctcccatacctacctgcaccattacgccgcgtgcacgagtgacctccagacaggtattcacactactaggatgaccggacacttcaaagctgacatcgaaatagcctttttccgctttccagtgatccatgtcgtcgttttgtgggtttacgagcacatccgcccccatctctttgcccaggctaagggaacggggactcacatcagcacagacaatttccgcggcccccagtgttttcactgcactgacaatcaggcagccaatgggtccaacaccggaaataaatactcgcttgccctgtaactcgccggcctgatgtgcggcatgaatcgcgacggctaaaggttcggcaaaagccataaccttttcgtcagctttggccggataagggacacattggctcgtttcgaccattttataacgggtaaaaccaccatcaacatgagggaaatacatggcactgccaaaaaaacgcatatctgtacactgattctcgttatgttcaatgcagtatttgcagtgaccgcacggtttagacggattaatggctaccgtttgcccttcatgtaattcactactgtcgctatgaataactttaccgataacttcatgacctaacaccatcggtgcctttatcatgaaattacctacttttccttcctgataataatgtaaatcggaaccgcaaattccacctcgggttatttgtactaatgttccattattattccaatctatcgtctgctcggtaacggcaacagttttcttgcccgcaacaacgcaggactgtgttttcacttgcataaattcctcactggtcaggtagacacctcggaagcatttaagcggttttaactgtcattatttgtgatgaagatcacgtcagaaaattgttacattactatgttacgcataacgtgatgtgccttgtaattcttatcagtagaaataaaaaaacgtgaaattattatgccgccaggcgtagtatcgcagcaggtaagatgattcaggagattttaaatggcgggtgaaagctttattttgatgggcgttagtgggagtggtaaaacattaattggtagcaaggttgccgcgttattatctgctaaatttattgatggtgacgatcttcatccagccaaaaatatagataaaatgagccagggtattccattatctgatgaagatcgacttccctggctggaacgcttaaatgatgctagttacagtctttataaaaagaatgaaacaggatttattgtctgtagtagtttaaaaaaacagtatcgtgatattttacgcaagggtagcccccatgttcatttcctctggttagatggcgactatgaaactattctcgcgcgaatgcagcgtcgggctgggcattttatgccggtagcgttactaaaaagtcagtttgaggcactggagcgtccacaagcagatgaacaggatattgtgcgcattgatatcaaccatgatattgccaatgtcaccgaacaatgtcggcaggctgtgctggcgatacgacaaaacagaatatgtgcgaaagagggcagcgccagtgatcagcgctgcgaatgattttcaaaaatcggctttcaacaccacgcggtaacgcgccttaccgtcgcgcacatgctggatggcgtcgttaattttgctcatcgggaacagttcggtggtcggcgcaaccttgctgcgggcggcaaaacgcatcagcttacgcagctcataaggcgtgccggtagcagaaccagagacgctgcgatcgcccgcaattaacgtaaaggccggaacagacagcggcgtgagaaccgcaccgaccgtatggaaattaccgccataggtcagcgcctcaaaatagggctgccagtcgaggctgacgttgacggtgttgataatgagatcaaactgccccgccagtgctttcagtgcctgcggatcgcggctattcaccactttatcggcacccatcgccagcacttcctgctctttcgccggattagaactaaaggctgtcacctcgcatcccattgcgtgcagaagttttatagcgatatgccccagcccgccaataccaattaccccaacgcggctggtagcagtgatatggtgcatcaacagtggtttaaagaccgtgataccgccgcacaacagcggcccggcggactcgatatcaatattttctggcagtggaatcacccattgccagtccgcacgcaacttctcggcaaagccaccgcgattcataatcgtcggcaccgcaccttgctcgcagttgatctgattaccgctaatacaggcgtcgcagtgaccacagctacgcgccgtccagccaatcccgacacgctgaccgacctgcaaacctttatcctgcgcggcgctcccgagtgccaccacgcgcccaatcacctcatgcccggcaaccagcggatattgactaaatccccattcgttatcgatcatgctcagatcggaatggcagatcccgcagtaatccacctgcacttcaacatcttgtggcctcagctcaccgggatcgtactcataaacttccagttcgccgcccgcttcttttgcggcatagctttttatcatgctcattttttggtccttctctggtgttgtttgggaagtgtagagcatggcagggcggggtgcctggagtgtgacaaaggttacacatcgctgtatgcaatgctgaaaatttcagcacttagcgaggtgcgagcaagctggcgcttgcatggtggcgtgcgacaggtataatccacaacgttttccgcatacctcttcagtgccgaagtggcgaaatcggtagacgcagttgattcaaaatcaaccgtagaaatacgtgccggttcgagtccggccttcggcaccaaaagtatgtaaatagacctcaactgaggtctttttttatgcctgaaatccagtgtttatctatctttcccgctatattaactctctcaaggtcaaccgatatcaacgtacatctaccaacatatgttggtacagatgatggtatttccggttcgataatgcttgtaccaacagggagggaatacgagaaatcacaggacattgctaatgctggtacgcaatattacctgaagctaaaaacctgcacgttagccctttgtaggccagataagacgcgtcagcgtcgcatctggcataaacaaagcgcactttgctggtctgttcccctcaccctaaccctctccccggaggggcgaggggactgtccgggcacatttttagactttgtcatcagtctgagcctgccattggcaggctctggtgtccttttacgctaccatgctaataatcagcacaataatcagcccaaccacggagttgaccagctccagcagaccccaggttttcaacgtgtcttttacactcaggtcaaagtaacctttgaacaaccagaaagatgcatcgttaatgtgggtgagggtgttggaacccgcagccgtcgccagtaccagcagcgccggattcacgccaaccagctgaccagttgctggatctaggattgcagcactgataatcccggcggcggtcatcgcgctaacgacaccctgacccgtcgccagacgaattagcacagtgatcagccatgccatgatgtaggggctgatattgccgtgggacatcaacatgccgatggtgtcgccaatgccggtgtcgatgatggtctgcttcagcacgccacccgcaccgatgatcagaatcaccattgcaatactcttcaccgcgctttcaaaagcgttcatcacccactgcatgtcatgaccacgtgcggtgccaaagagtacgaatgcaaccaccatcgcaataaacattgcaatcgggctggaaccgataaagttaaccacttcccaggcaggggtatcttttaccagccagatattggcgatggtggtagagatcataatgatcgccgggatcagcggcaccagaatgctaacgccgaaagagggcagattattcatatctaccggttgatctgctttcaggaaacttggcgttgggcgctcaagattgccgaggaacttcggcaggatcagacctgcgcagattacacttgggatcgtcaccagtacgccatagatataaaccatccccatatccgcgccataagcattcaccagcgccaccggacccggctgcggtgggaacagactatgtgcggtagtggcagctgctactgccgggatcgccagtttcaggaacggaattttagcttcggcggcaataacaataaccagcggcgctaacatgataaaggccacttcatagaacatcgccagaccaaaaatcaggccgatgataatcacgctcagctgtacatagcgcagaccgagacgcgccagcagcgtatgcgctatctggtgagccgcgccggagtcgaccatcaatttaccgatgaccgcaccgaacaccacgatgatagccagttcccccagcgtgttgccgaagcccgctttcatagtgtgcagcaggctcatcaaatccatgcccgccagcatcccgacggacagcgccgccaccaacaaagccaccatactattgattttgaacttcaaattcagtaccagcatcagaccaatgccgaataccacccagagaatgttaagcacatgcataacgttttaccttacctggttgaaccgttgttattttgggcgatatgttatgtaaattggtcaaccattgttgcgatgaatgtcacatcctctgatcaataaccatcgattaccctttgctgcaatttgcagcaacaaccatgagagtgaaattcttgtgatgtggttaaccaatttcagaattcgggttgacatgtcttaccaaaaggtagaacttatacgccatctcatccgatgcaacgccacggctgcggtctggttgttcatccggatacctaaacaactccagggttccgcgtctctttgctgtggaacccactatgtgaaagaggaaaaatcatggaacagacctggcgctggtacggcccaaacgatccggtttctttagctgatgtccgtcaggcgggcgcaactggcgtggttaccgcgctgcaccatatcccgaacggcgaagtatggtccgttgaagagatcctcaaacgcaaggcgatcattgaagacgcaggcctggtgtggtctgtcgtagaaagcgtgccaattcacgaagatatcaaaacccacactggcaactatgagcagtggatcgctaactatcagcagactctgcgcaacctggcgcagtgtggcattcgcaccgtgtgctacaacttcatgccggtgctcgactggacccgtactgacctcgaatacgtgctgccagacggctccaaagctctgcgcttcgaccagatcgaattcgctgcattcgaaatgcatatcctgaaacgcccaggcgcggaagcggattacaccgaagaagaaattgctcaggcagctgaacgcttcgccactatgagcgatgaagacaaagcgcgtctgacccgtaacatcattgctggtcttccgggcgcggaagaaggctacaccctcgaccagttccgtaaacacctggagctgtacaaagatatcgacaaagcgaagctgcgcgaaaactttgccgtcttcctgaaagcgattattccagttgctgaagaagtcggcgtgcgtatggctgttcacccggacgatccgccgcgcccgatcctcggcctgccgcgcattgtttccaccattgaagatatgcagtggatggttgataccgtaaacagcatggcaaacggttttaccatgtgcaccggttcctacggcgtgcgtgctgacaacgatctggttgatatgatcaagcagttcggtccgcgtatttacttcacccatctgcgctccaccatgcgtgaagataacccgaaaaccttccacgaagcggcgcacctgaacggtgacgttgatatgtacgaagtggtgaaagcgattgttgaagaagaacaccgtcgtaaagcggaaggcaaagaagacctgatcccgatgcgtccggaccacggtcatcagatgctggacgacctgaagaagaaaaccaacccaggttactccgcaattggtcgtctgaaaggcctggccgaagttcgcggtgtcgaactggcgatccagcgcgctttctttagccgttaatatccaccggcatggctgcgcgccgtgccggttccttcttccttgccgtcactctttgaagacggattctggagtttacgatgactactattgttgacagcaatctgccggttgcccgcccgagttgggatcattctcgtctggaaagtcgcattgtgcatctcggttgcggggcgtttcaccgcgcgcaccaggcgctgtatacccatcatctgctggaaagcaccgacagcgactggggcatctgcgaagttaacctgatgccaggcaacgaccgcgtgctgatcgaaaacctgaaaaaacagcaactgctgtacaccgtagcggaaaaaggcgcagagagcaccgagctgaaaattatcggtagcatgaaagaagcgctgcatccggaaatcgatggctgcgaaggtattctcaacgcgatggcgcgtccgcaaacggcgattgtctctctaacggtcacggaaaaaggctactgcgctgatgcggcaagcggtcaactggatctcaataacccgctgatcaagcacgatctggaaaacccgactgcgccgaagtccgcgattggttacatcgtcgaagcgttgcgtctgcgtcgtgaaaaagggttgaaagcgtttacggtgatgtcctgcgataacgtgcgtgaaaacggtcatgtggcgaaggtcgcggtactggggctggctcaggcgcgtgacccgcagctggcggcatggattgaagaaaatgtcaccttcccgtgcaccatggttgaccgcatcgttccggcggcgacgccagaaaccttacaggaaattgctgaccagctgggtgtttacgacccgtgcgccattgcctgcgaaccgttccgtcagtgggtgattgaagataacttcgttaatggtcgcccggattgggataaagtgggcgcacagttcgttgcagacgttgtgccgttcgaaatgatgaagctgcgtatgctgaacggcagccactcttttctggcgtacctcggttacctcggcggctatgaaaccattgccgacaccgtgactaacccggcttatcgcaaagcggcctttgccctgatgatgcaggaacaagcgccaacgctgagcatgccggaaggtacagacctgaacgcctatgcgacgctgctgatcgagcgtttcagcaacccgtctctgcgtcaccgtacctggcagattgcgatggacggcagccagaagttaccgcagcgtctgctggacccggtgcgtctgcacctgcaaaacggcggcagctggcgtcacctggcgctgggcgtggctggctggatgcgttacacccagggcgtggatgagcagggtaatgccattgacgtggtcgacccgatgctggcggagttccagaagatcaacgcgcagtatcagggcgcagaccgcgtgaaagcgctgctgggcctgagcggtatttttgccgatgatctgccgcagaatgccgactttgttggcgcagtgacggcggcatatcagcagctgtgcgaacgcggtgcgcgcgagtgtgtggctgcgctgtaactaactgattaccctacagacttactggtcaatcaaactgatatttggttgaccagttttcgtttttttgcccacctgtacgtgccaacttccagtgctaatggtatagtttgagattaacgggggccgtaaaattgcccgttgtaggccggataaggcgttcacgccgcatccggcaaaaatttgattaaccgcacctaacggacacaacaccatgaaatctgccacctctgcgcaaagaccttaccaggaagtcggggcgatgatccgcgatctgatcataaagacgccgtacaatcctggcgaacggctgccgccggagcgtgaaattgcagaaatgcttgatgtcacgcggacggtggtacgtgaagcgctgatcatgctggagatcaaagggctggtggaagtacgccggggtgccggtatctatgttcttgataacagtggcagccagaacacagacagtccggatgccaacgtctgcaacgatgccggtccttttgagctgttacaggcgcggcagttattggagagcaacatcgccgagtttgccgctttgcaggctacccgcgaagatatcgtcaaaatgcgtcaggcattgcaactggaagagcgtgaactggcttccagtgcgccgggcagcagcgaaagcggtgacatgcagttccatctcgctattgccgaagcaacgcataacagcatgctggtggagctgttccgtcagtcctggcagtggcgggaaaacaatccaatgtggatccagttgcacagccatctggatgacagcctgtatcgcaaagagtggttgggcgatcacaaacagatcctcgccgcgttaatcaaaaaagatgcccgagcggcgaagctggcaatgtggcagcatctggaaaacgttaagcaacgtctgctggaattcagcaacgttgacgatatttattttgatggctatctgtttgatagttggccgctggataaagtcgacgcctgacttattataataagcgcaagggtaaacgttccttgcgctttcttaaattaagaagtcgcaatgagtattactttgtaaattgcagggtattgtttagctatctgtataacctgaatgttagtactcattcttcctggtagtaaggcgagattattaaagttgccatgcagcgtccggggaagtgttgggcgctgttttttttgtttcttaataatgtgttgtaagccgtagaaggcgtgtaggtcgcaccctatgcgacctacacatcagtcaggaattacccttcacgttctaccactttaatttccaccatgccgatcccgagcttacgcgggctgtgtccgaggatattcccttcgttggtactgacaggttccggcggcacaattaccagtgtgtcggcatcggttgggttatcgaaatgcagtgtggtggtggtcacttcattgcccagcacaagagtttgttcttcattgcctacgcgtaccggaataggacggctggcgttattgccgtatgctttggcggtaatcaccaggtcaaatttcttcggcagcggatgcttgtactcgatttttacttcatcgcccagctgcgcgttggaccagcggccccagctctccggacgggaaatcccgctaaactgtttcacctcttctggcgcaccggcgacgttaaagatgaaactgtcggctttgtagcgaatatcgttatcaacaatcttcagcgtatcgacattgcctttgtaacgcgccatgtcgatgaccgtatctttaaatgccgttttgccctgccatgttgttttgtcaacatgctgaacaatttgctgaccgccaagctgcccttggctgacacaccagtcggtggaaagtgccagttccggagcccagagttgtgccatcttgtagcaacggtcaacccagacgaaattgtcgcgtggagcgaaatcggccagctggaaacgcagcggtgcactgtattcgctttccggcagcggttccacgcgtttgtcactaacccgcaacagcagcggcaaacggaaatggctaccgctgaaggcaatcatgtttttctgctggtcgatggtgaactctttcatctctttagggaatttccacaggcggatgatatctggcttccacgccaatgttttctctttgatattgaggaagatttcgctcatgctctgcccggataaactgctacgaccaagtccgagatagttatcgccaccgagaatgtccagcaccgtcgcgccgttatccatcgtgttacgcttcactgccagcgtctcttgctgcggcttgtcgccacgaatgacaaaaaacaggttattgcgatcctgcttattgaggtatttccacgccgtgttgttcatcgctaaatggtcagaagagacgacgatgacggtatctttaaaccacggactcgctttgattttgttgataaacgtcgcgatgttctcctggctgcaacttaccgcgctgaaactctgattcggtttaccgtcaaaatcatattttttgcggttacaggtacgagagataaaaccatccgggtgatgggtatcgactgtcagggtaaacagactgaatcgctgaccactgcgggaaagctcttcaaactttttccacgcttcatcgagaacggtatcgtcgtagaatccccagtcgttgcgatagtgcgggtcggctaccacgcttttcagctcttcactgccgtataagtggtcgaagccatggctcttcaggaacacatctttaccggcaaaacgcagattcgcgccctgcacgaaatagttctgataaccgctgtttttcaggatatctcccagacagatgttctgcgggaagaagctggagacagaggcggaggcgttgccttcaaagggggcaaacagcggtatgccgcactgagaagccaccatgcccgcaatcgtgtaatctgttcccggcagctgctgcgtgtggctgaaatccaggccttcatttttcaacgcgcccagttcaggcgtgagatccgggaaagcctcgttatcaaaataggtccgctcgagactttcgccgtagatataaaccaggttgagtttcgggtcagggatagttttgctcggctctttataataagccgcaaagtccgggtcgccgtcgcgactctgggatttcaccagttccgttatctgacgaaatgccgggctggcgtccacgctacccagcgccagtaagagcgccagcaggctgtaaccaaaatggtgcggatgatggcgacgacggcgcaggatccagcccagcgcaccgaacaccgctgtcagccccagcacaatgccgatacccggcaaaatgtatttgctgacgccagcaccggtcaggctgttggttaaggtatagagaaccgcgtcgttaataccatcgccagtaaaatagtcgctggcaaacagggtgatatttaaaacgacaaatagccccagcaccgttaacgtggctgcaaaccaccaggtgttacgtcccgctttccatgcgtaaatcagcacagaggcgagaaaaagggcgaaagagagtagttcactcaacgggcgatcctcactaaaccgggccgtttagccaacgtttaagctttttgagaagcacaatgtaatggcgtcgccatattgctgcaattctagtgtcaaaaaaatgcgatgttgttaggaattagtttataaacagacttttttgattacggtcacttcccgtgtaacaggggtaaaaccgtccaggagcagggaaaagggcaggagagagccgcgtcagccgggtaacagctaaaacgcggcgtttcgcggttcaggaaatgaagttcagcccctgttttaacaccagatcgcaggctttggttttcaccttttctgccagcggagttgttccgatgttatccagattgagttgctgaccatctttggttttcagcaaaccctgaatgccgtccagatagttggtgtcttctttttgctcttcactgttcaggcccagcttttccagcacctggttcttgatgttttcggcatcggttacgctcgccagcttttgcttcgcgcagtattgcagaatgcctgcggcattgttcatgttatctgcgcttaaggcctggtttccgctgctaagcaagttagttaaactcgcgaggctccaaccgccttcctgtgtcgtgctgttttggttgccaagttcgctggcggcgctggagagcgcatctttccaggacgcagcatgcaccccggtggaaattaatgcgctggcggcaatggcacagcacagaagatgtttaacagttttcatcatcattactcaaggtggaattgtgtcgcagtataccgccagaaacggggattaatactctttacctgttacccggctacggtagctatcccagttgaagatcacccacaaactgttacccaggcgcatacggtccatcacgcgttcgcccagcaacttggtcatctcttccatattactgttggtcagcatcccggttgggcgtttggaagaagagcggcgatcgacgatctggttgatgatcactttttcgtatttgctttcggtctgcacgccgatctcatcgatcaccagcagatcaacgttgctcagatcgttaagcagttgttcttcgctggtaccgctattcctgaaggtatctttcatcgcgctcataatatcggccacggtgatgatcaatacggatttaccgcgtagcagcagctcgttgcagattgccgccgccagatggtttttgccggttcctggcttaccagaaaagatgaagctggcgatgttgccgtcaaactcttcgacatactggcgcgctttgcttaacgcattcatctgcccttcacactcaacgcgatagttctcaaaggaacagttctgatgcagtggacgaataccggagcggttaaaggtgcgctgcattttcatcgcccgattttcacgttcgagagcggcggagcggatcgctccttgttctttttgccaggccagtagttcttcacccgttttgaatgcgggtttgatatgggcaggcatcattttttgcaggcgttgcatcaggtcgccaacgtttttcatcgttaccctctgaatcctggtggaatttggctgtcaggttcgctgaccgtattcacatctcgtttcggcagtccgccgttgctggcacgaccgatttgcaggctgcgcgccagtttttgttgccactgcacatggtgaaagactttaccttccgcctgccagtaggcaatgaaactggccagttcttcggtggtcaccggctctcttagcgccacgccccatagcgccgccaggcggataaaatcggcatcgggttgccagtccggatacatggcgaatttccccatgggtacagcaacgggagcggcttgcggttcctgatagagttgatcgtccagagcgacatcgcttcccggacgcgccagcttttcttccagcgccagcagttcagccaggcgtgcaggcgtgacggcataaaacgccggggcattgttagcaaatacggcaaccacaccgccttcagcttttgccagaacggtttggtgatcgtgtaccagggcgtcaataccaacgacgtccggggtcaaaactctggaagacatactgtttctcaaatatggaacgatgaacgagaagggagataacttttatagtaacacacggaggagaggaggctgtctctcatccgtgtgcttaagcgaggcaattttatacgcgagggcgcttgcggtacaaccataatccaggaatggaaagaccgatggataacgcaccaacaatgctactagctgtaagaaagttggttaacagggtaatcatcaacggttcgctgtaacctaactggctgatttttaccgcgctaatcattgcggtataagcgcttatgcccgggaacatagggataacggccgccacggtaaacactttcggatgcgccagataccagcggctccattgaataccaatggtaccgaccagcatagaagccataaaggtactccactcaatattcaacccgctggtcatcaagatcattcgggaaccatgacctatcgagccaagcagcgcacaccagcgtaacgcccgcacgggaacgttgaacaccatcgcaaagccgaccgcaggaatggcggcgaggatcatatcctgcgccaacgctaacagaaattcgatcacacccatccgcgtagcccccaaatcgtcagtgccatcactacgccgacgcaggtagccagtgtcagcagactggcgatcgcccagcgtgccagtccggtattgatgtggcctttaaacatatcggcgacggcattaatcaacggaaagcccggcactagcagcagaacgctggcggccatcgcaatggtgggggtattgctgaaagtggggagttgcaaaagcaatccggaaatggtggtggcggcgaaagcggtaaggcaaaagttgatctgtggatgaagatgacgttgtgccagcagctggcggatatacatcgcggtcgtactggcaaagaaggtgatgacggcaccatcccagccaccgttattgagtttacagaaacaggcgcaagaaaggccaaccattaaggctaccagccatcttgggtaacgtaatggctgaatttggctaaatcgtttctctacgcctttgtaatccagcagatgatgctccgcaagaatcacaatgtgctggacttcagtcaccacatgcatattaatgccgcgatcgtgatttttacgtgtgcttgtcaggcattgcccatctttaatagttgtcagcactatggcgttgctagagatagaactttcgacgctgtccattcccagtgcccgacccagtcgactggaaagctcatcaaccaacgcgctttccgcaccatgttgcaaaagaaataatccacactggatacaaagccgtgttacggctcgctgttgctcagtttgcataactcgccctttgtcatagacgtgctgcgtattgttcagataatgagaatccatttgtatcatgaagcacggttgttttgcggtaggttaagatcaaaattgcgctgattaatcctggttatcgggagaagctcggtgataaaaagcgaattatctctcgccgcaaacaaactatcacatgaatattatcatcataatgaatttattgtttggcctttacgaatcaggataatagataaccgggcacgttttttaatgttaacaagctaaaaccatcagatttcattgaataaatattggttgtgtgattttgcattctgcgggaagggatatcatttaattataaattaaatgaatgtgatttctgtttttcattaagtattcctaacaacttaatgtagatattttaaatgtctccaggctatttcaccaggttatcatttgatgctaaccttctgacacatgcagtggagttgttgtgcagcaggagtatgctgatatgaaagtgaatgctaaggataatttattcgcttaatctattaatttgctggaaacatttaaggaatgaatatcctgaataaaccatcataatttttagacagtggatgtggaggaaatatgttgccaggatgctgcaaaaatggaattgttatcagtaaaatacctgttatgcaagcagggttaaaagaggtcatgaggactcacttccctgaatatgaaataatatccagcgcctctgcggaggaccttaccttattacaattacgtcgttccggattagtcattgctgatttagccggtgaaagtgaagatccacgttctgtttgtgaacattattattctttaatcagtcaatatcgggaaattcactgggttttcatggtgagtcgctcctggtattcccaggcagtagaactgctcatgtgccctacggcgacgttattgtctgatgttgaacccattgagaatctggtcaagaccgtacgttccggcaatacgcacgcagagcgtatcagcgccatgctgacctccccggcaatgactgaaactcatgattttagctatcgctccgtcattctcactcttagtgagcgcaaggtactgcggctattaggtaaaggatggggcatcaaccagatagctagtttgcttaagaaaagtaataaaactatcagcgcccaaaaaaacagtgcgatgcgtcgactggcaattcacagcaacgctgaaatgtatgcatggataaatagcgcgcagggtgcaagagaacttaacttgccttctgtttatggagatgccgcagaatggaacacagccgaattaagaagagaaatgagccacagttaaaaaaatgcgtcatgagtagtatcggtattgagagtttattcagaaagtttgcgggtaacccttataagctccatacctataccagtcaggagagttttcaggatgccatgagccggatcagctttgcggcggtcattttttctttttctgccatgagaagtgagcgcagagagggattatcttgcctgactgaactggcgattaagtttccgcgtacccggcgtttagttattgcggatgatgatattgaagctcggctgattggtagtttgagcccaagtccgctggacggtgtattaagtaaagcgagtacgctggagatttttcatcaggaactctttttgagtttaaatggtgtacgtcaggcgaccgaccgactgaacaatcagtggtacattaaccaaagccggacgttaagcccgacggagagagaaatattgcgctttatgagccgtggctacagtatgacacaaattgccgagcagcttaaacgcaatatcaaaacgatccgtgcacataaatttaatgtgatgagcaaactgggcgtcagttctgacgcagggttgttggaggccgcagatattctgttatgtatgcggcattgcgaaacaagtaatgtgttgcatccctattaatccgcatgatgccgggtttacttccccggcagtgctttcatttcagcgtacaatcgccacattgctgcacatccggtaagcgataacgctggcagcaagtgcggcgcaccagcaggccgtcgcgcagtaccacggtacgccagagtggattatcttcaccgttcgtgagcgttttctcaaaaaagagggcatggcgcaggctttcaacagtagcctcgccgagcagttgcttcatctcagtgagataccagttgatcaaataaccggtattactccagataagtttgccgttgatctctccggtcgcttctagtgcttgcacaaccggaaccagcgcctggctgattaacgtttccattcgatgctgcgggctatgtggtgttgcgtttttatcttcacacacatcgacccagaaacaggcgacgcgtccggtttcgtgaaactcagcatggaaatgttccgggctcacatctaatgccttttcctgcgtcagtagcgccagcattaatggtggcaccatcaggccgatataccattgtgcccatagactgatcagcggtttgttctcgcggatcatcatcggttggttgcgatagatatgatcggaatagaccgccagcagagaacttagcacattcggactactccattgcgccagcgtcatggcgttaagtggggcaggttcatccaggcggataaactccagcaaatgttcacgatgttttgcgatcgtcgcccgcacggcttgcgcaagcgtgggatcctgcggctggagatgcgttcgccagatgacatcttcatagagcggtgcggaacgataggccataatcgggatagtaatctaaatgataatgattgctaatcatagcgataggtttacccgatagcaagggatttatctggcttgcaaatgataaaaattatcatatgatattggttatcattatcaatgaaagagatgaaatcatgttgcaacgtacgctgggcagtggctggggagtgttgctgccgggattgctgattgcggggctgatgtatgcggatttaagcagtgatcagtggcggattgtcattctgatgggattagtattgacgccgatgatgctgtatcacaaacagttgcggcattacattttgctaccaagctgcctggcacttattgctggcatcatgctgatgataatgaatttgaatcagggatgaaaaatcaaggaagaaacaagaaaggaagtaaagataattggtgcgaggggggggacttgaacccccacgtccgtaaggacactaacacctgaagctagcgcgtctaccaattccgccaccttcgcacagtcatcttactttttttgatatcgcctcgtttggtgcgaggggggggacttgaacccccacgtccgtaagaacactaacacctgaagctagcgcgtctaccaattccgccaccttcgcccagtgcgagcaatatcaacgtggtttttggtgcgaggggggggacttgaacccccacgtccgtaaggacactaacacctgaagctagcgcgtctaccaattccgccaccttcgcataccatcaattcttaaaaagaattgctaccacggaggcgcattctagtggttttcagcttttcgtcaatagttaattatcgacagaggtgtaattgctggaaaaatgtccatcaggaaactagcgtgcaggtttggtatgcatgcgggggcagatgccagatgcgacgctggcgcgtcttatctggcctacgaagggctaacgtgcaggttttgtaggtcggataaggcgttcacgccgcatccgacacggtattcggcgagataattaacctttcttcgcctggcgggtcataatggcgcgatacaccttgaagcgccctgtttgcgcgatcacttcgtggaagccaaatgtctcatccagcacgtccggataaggcaggaaggcgttcgctacaattcgcagctcgccgccgctattaagatgacgcaccgcaccgcgaatcagcgtttgcgccgcatccaggctggtttgcatcccatcgtggaacggcgggttggagatgatcatatcaaaacgacctttcacctcggaaaagacgttgctggcaaagacttcaccttcaacaccgttggccgcaagtgttgcgcggctggcttctaccgccggggcagagacatcgcacaaggtgagacgaattttcgggctatggcgcgcaaaggcaacactaagcacgcccgcgccacagccgacatccagcactttacctttcgtgtgcggagttaacgtgctgagcagcaactggctaccgacatccagaccgtcgcggctaaacacgccaggcagcgttttgaccgtcaggccatcgacgctgtattcgccccagaatttctccgcatcaaataccggctgtttttccagacgaccaaaatagaggccacagcgacgagcgctgtcgactttattcaacggcgcataatctgccagcatctgctcggcgctgcgcacgccgctgcggttctcgccaacgacaaaaatatctgtccccactggcagcagagaaagtaaattcatcaactggaactgggcttccggtttgttcttcggccagtagtaaatcagcgtatcgcaatctgcgacgtcatccgccgtggcgaccagactgaaacgggcgttatcccccatctggcggcttaatacctgccagtggtggaattgctgggtatgagcacggctggccgcggtatctaaacgcgcgggcaggtcatcctgtaagtctccggcaaacagaatacggctttgttcgaaatcatcactgtgacgcagcaagacttcacttgccggggtaaatgcagacatggaatgctcctcaattgatactggcggcgattatagccatatgttggcgcggtatcgacgaatttgctatatttgcgcccctgacaacaggagcgattcgctatgacatcccgacgagactggcagttacagcaactgggcattacccagtggagcctgcgtcgccctggcgcgttgcagggggagattgccattgcgatcccggcacacgtccgtctggtgatggtggcaaacgatcttcccgccctgactgatcctttagtgagcgatgttctgcgcgcattaaccgtcagccccgaccaggtgctgcaactgacgccagaaaaaatcgcgatgctgccgcaaggcagtcactgcaacagttggcggttgggtactgacgaaccgctaagtctggaaggcgctcaggtggcaagtccggcgctcaccgatttacgggcaaacccaacggcacgcgccgcgttatggcaacaaatttgcacatatgaacacgatttcttccctcgaaacgactgatttaccggcggcttaccacattgaacaacgcgcccacgcctttccgtggagtgaaaaaacgtttgccagcaaccagggcgagcgttatctcaactttcagttaacgcaaaacggcaaaatggcggcgtttgcgattacgcaagtggtgctggatgaagctacattgttcaatattgcggtcgatcctgactatcagcgtcagggattgggaagggcgctgctggaacatctgatcgacgaactggaaaaacgcggcgtggcgacactatggctggaagtccgtgctagtaacgctgccgccattgccctgtacgaaagtttaggctttaacgaggcgacgattcgccgcaattactaccccaccacggacggtcgcgaagacgccatcatcatggcgttgccaatcagtatgtaatacaaggtggaataatgaagtgggactggattttctttgatgccgatgaaacgctgtttacctttgacagtttcaccggcctgcagcggatgtttcttgattacagcgtcacctttaccgctgaagattttcaggactatcaggccgttaacaagccactgtgggtggattatcaaaacggcgcgatcactagtttacagcttcagcacgggcggtttgagagctgggccgaacggctgaacgtcgagccaggtaaactcaacgaagcctttattaatgcgatggcggaaatctgcacgccgctgccgggcgcggtttctctgcttaacgccattcgtggcaacgccaaaatcggcatcatcaccaacggctttagtgccttgcaacaggtgcgtctggaacgcacgggcctgcgtgattacttcgatttgctggtgatttccgaagaagttggcgttgccaaaccgaataagaaaattttcgattatgcgctggaacaggcgggcaatcctgaccgtagtcgcgtgctgatggttggcgacactgccgagtccgatattctcggtggcatcaacgccgggcttgcgacctgctggctgaatgcacaccatcgcgagcaaccagaaggcatcgcgcccacctggaccgtttctagcttgcacgaactggagcagctcctgtgtaaacactgattgcctcccccccgttgatgggtaaaatagccgcaatttttcgttttcaacaagcgcggcgcgatgccgcttactcaagaagaaagaattatgacgttgtctccttatttgcaagaggtggcgaagcgccgcacttttgccattatttctcacccggacgccggtaagactaccatcaccgagaaggtgctgctgttcggacaggccattcagaccgccggtacagtaaaaggccgtggttccaaccagcacgctaagagcgactggatggagatggaaaagcagcgtgggatctccattactacgtctgtgatgcagtttccgtatcacgattgcctggttaacctgctcgacaccccggggcacgaagacttcagcgaagatacctatcgtaccctgacggcggtggactgctgcctgatggttatcgacgccgcaaaaggtgttgaagatcgtacccgtaagctgatggaagttacccgtctgcgcgacacgccgatcctcacctttatgaacaaacttgaccgtgatatccgcgacccgatggagctgctcgatgaagttgagaacgagctgaaaatcggctgtgcgccgatcacctggccgattggctgcggcaagctgtttaaaggcgtttaccacctttataaagacgaaacctatctctatcagagcggtaaaggccacaccattcaggaagtccgcattgttaaagggctgaataacccggatctcgatgctgcggttggtgaagatctggcacagcagctgcgtgacgaactggaactggtgaaaggcgcgtctaacgagttcgacaaagagctgttccttgcgggcgaaatcactccggtattcttcggtactgcgctgggtaacttcggcgtcgatcatatgttggatggcctggtggagtgggcacctgcgccgatgccgcgtcagactgatacccgtaccgtagaagcgagcgaagataaatttaccggcttcgtatttaaaattcaggccaacatggacccgaaacaccgcgaccgcgtggcgtttatgcgtgtggtgtccggtaaatatgaaaaaggcatgaaactgcgccaggtgcgcactgcgaaagatgtggtgatctccgacgcgctgacctttatggcgggtgaccgtagccacgttgaagaagcgtatccgggcgatatcctcggcctgcacaaccacggcaccattcagatcggcgacacctttacccagggtgagatgatgaagttcaccggtattccgaacttcgcaccagaactgttccgtcgtatccgcctgaaagatccgctgaagcaaaaacagctgctcaaagggctggtacagctttccgaagagggcgcggtgcaggtgttccgtccaatctccaacaacgatctgatcgttggtgcagttggtgtgctgcagtttgatgtggtggtagcgcgcctgaagagcgaatacaacgttgaagcagtgtatgagagtgtcaacgttgccactgcccgctgggtagaatgtgcagacgcgaagaaattcgaagagttcaagcgtaagaacgaaagccaactggcgcttgatggcggcgataacctcgcttacatcgctaccagcatggtcaacctgcgcctggcacaggaacgttatccggacgttcagttccaccagacccgcgagcattaattcttgcctccagggcgcggtagccgctgcgccctgtcaatttcccttccttattagccgcttacggaatgttcttaaaacattcacttttgcttatgttttcgctgatatcccgagcggtttcaaaattgtgatctatatttaacaaagtgatgacatttctgacggcgttaaataccgttcaatgcgtagatatcagtatctaaagccgtcgattgtcattctaccgatattaataactgattcagaggctgtaatggtcgttattcatcactcatcgcttttgtgatggcgaccattgacttctgtagagggtgaagtctctccctattcagcaatgcaacctcgtgttgccaggctcaaattacgagcaaacatacaggaataaatcgatgactatgacaagactgaagattagcaaaactctgctggctgtaatgttgacctctgccgtcgcgaccggctctgcctacgcggaaaacaacgcgcagactaccaatgaaagcgcagggcaaaaagtcgatagctctatgaataaagtcggtaatttcatggatgacagcgccatcaccgcgaaagtgaaggcggccctggtggatcatgacaacatcaagagcaccgatatctctgtaaaaaccgatcaaaaagtcgtgaccctgagcggtttcgttgaaagccaggcccaggccgaagaggcagtgaaagtggcgaaaggcgttgaaggggtgacctctgtcagcgacaaactgcacgttcgcgacgctaaagaaggcagcgtgaagggctacgcgggtgacaccgccaccaccagtgaaatcaaagccaaactgctggcggacgatatcgtcccttcccgtcatgtgaaagttgaaaccaccgacggcgtggttcagctctccggtaccgtcgattctcaggcacaaagtgaccgtgctgaaagtatcgccaaagcggtagatggtgtgaaaagcgttaaaaatgatctgaaaactaagtaattcgtcgtaattcgtcctcccgaactttgtcgggaggcgcgatgtgcaccacactaaaaatatcgcattgagtgattttcacgctcatatcaagcggtgacattaactatggtaaaggagacgcttatgtttcgttggggcatcatatttctggttatcgcgttaatcgccgccgcacttgggtttggtggtctggccggtaccgctgcaggcgcagctaaaattgtctttgtcgtcgggattattctgttcctggtgagtttgttcatgggccgaaaacgaccctaaatttcagaccattaagaaaattttatccaaagccagtccagcggactggcttttgcggttttagcgaataataaattgcgttactttgtcattctttcacaacaaaaacaggaaggcagaggtggggcagcgaatacctgtaacgcttggtaatattgcgccgttgagcctaaggccgttccagcctggacgaatagctctggtgtgcgaaggcggcggacagcgtggaattttcacggctggcgtgctggatgagtttatgcgcgcgcagtttaatcctttcgatctttatctcggcacatctgccggggcgcagaacctcagcgcgtttatctgcaatcagcccggttacgcgcgcaaagtcatcatgcgctataccacaaaacgcgaatttttcgatccattgcgctttgtccgtggaggaaatcttatcgatctcgactggctggtggaggccactgcaagccagatgccgttgcaaatggataccgccgcgcggttgtttgacagcggcaaaagcttttatatgtgcgcctgtcgtcaggatgactacgcgccgaattactttttaccaaccaaacaaaactggctggatgtgattcgcgcctccagtgcgatacctggcttttatcgtagcggagtgagcctggaaggcattaactacctggatggcgggatcagtgatgcgattccggttaaagaggcggcaaggcagggcgctaaaacgttggtcgtcattcgcactgtgccgagtcaaatgtactacacgccgcagtggttcaaacgcatggaacgctggctgggtgacagtagcctgcagccgctggtcaatctggtgcagcatcatgaaaccagctatcgtgacattcagcaatttattgagaaaccaccgggcaagctgcggatattcgaaatttatccgccgaagccattacatagtatcgcgcttggcagtcggattccggcgctgcgtgaagactataaacttgggcgtttatgcggtcgttatttcctcgccacggttggcaagctattaactgaaaaagcgccgcttacccgccatctggtgccagtggtgacgccggaaagcattgtcattccgcctgcgccagtcgccaacgatacgctggttgccgaagtgagcgacgctccgcaggcgaacgacccgacatttaacaatgaggatctggcttgatttgccgttttatcgacacccactgccattttgatttcccgccgtttagtggcgatgaagaggccagcctgcaacgcgcggcacaagcgggcgtaggcaagatcattgttccggcaacagaggcggaaaattttgcccgtgtgttggcattagcggaaaattatcaaccgctgtatgccgcattgggcttgcatcctggtatgttggaaaaacatagcgatgtgtctcttgagcagctacagcaggcgctggaaaggcgtccggcgaaggtggtggcggtgggggagatcggtctggatctctttggcgacgatccgcaatttgagaggcagcagtggttactcgacgaacaactgaaactggcgaaacgctacgatctgccggtgatcctgcatagtcggcgcacgcacgacaaactggcgatgcatcttaaacgccacgatttaccgcgcactggcgtggttcacggtttttccggcagcctgcaacaggccgaacggtttgtacagctgggctacaaaattggcgtaggcggtactatcacctatccacgcgccagtaaaacccgcgatgtcatcgcaaaattaccgctggcaagcttattgctggaaaccgacgcgccggatatgccgctcaacggttttcaggggcagcctaaccgcccggagcaggctgcccgtgtgttcgccgtgctttgcgagttgcgccgggaaccggcggatgagattgcgcaagcgttgcttaataacacgtatacgttgtttaacgtgccgtaagccggataaggcgttcacgccgcatccggcagttggcgcacaatgcctgatgcgacgcttaacgcgtcttatcatgcctacaggtttgtgccgaaccgtaggccggataaggcgttcacgccgcatccggcagttggcgcacaatgcctgatgcgacgcttgtcgcgtcttatcatgcctacaagtctgtgccgaaccgtaggccggataaggcgttcacgccgcatccggcagtcggcgcataatgcctgatgcgacgcttgtcgcgtcttatcatgcctacaggtttgtgccgaaccgtaggccggataaggcgttcgcgccgcatccggcagttggcgcacaatgcctgatgcgacgcttgacgcgtcttatcaggcctacaagtctgtgccgaaccgtaggccgtatccggcatgtcacaaatagagcgccggaaatatcaaccggctcaccccgcgcacctttaacgcatcagccaacggctcaacgtcttccggcgtggcgctcgcccagctttgcgcctcgccatacacgccgtgggcatgaaacgcgttcaggcgtaccggaacatcgccgagtcccttgataaacgccgccagttcttcgatgtgttgcaaataatccacctggccagggatcaccagcaaacgcagttccgccagcttgccgcgctctgccagcaaatagatgctgcgcttaatctgctgattatcgcgtccggtgagttgttgatgacattcgctcccccacgctttgagatcgagcattgcgccgtcgcacaccgggagcaatttttcccagccggtttcgctcaacatgccgttactgtccaccagacaggtgagatggcgcagttgcggatcgtttttgatagcagtaaacagcgccaccacaaacggcagctgggtcgtggcttcaccgccactcaccgttatcccttcgataaacagcactgctttgcggacatggctaagcacttcgtccacgctcatggattgcgccatgggcgtggcatgttgcggacacctcttcaggcaggtatcacactgctcgcaaaccacagcgttccacaccactttgccgtcaacaatctgcaacgcctgatgcggacactgtggcacgcactccccacagtcattgcaacgtcccatcgtccacggattgtgacagtttttgcagcgcagattgcagccctgcaaaaacagagccagacgactgcctggcccgtcaacgcaggagaaggggataatcttactgactaaagcgcatctgctgttcatggcttatcacgcgcggctggcgttccagaatacgagtgttgcgtgcggcttcttcgcccagccaggtggtgttggtgcgactaccttcggcgcgatatttttctaaatcgctcaaacgcaccatataaccggtaacgcgaaccagatcgttaccgctgacattggcggtaaattcacgcattccggctttaaaggcaccgaggcaaagctgtaccagtgcctgcgggttacgtttgatggtttcgtcgagcgtcagaatgtcgctgatgccggaataataataagcatgatgcggggcgacagtttgcagatgggtgatcggatctggctcatcgccatacggcaaacgcgcgcccggcgtggtgccgatatcggaactgatcccgctctgtgcgtgtaacatggcgcgtttttgccagccatatttcacgggggtattggcgacaaactccgccagttgcgcgctgatgcgataacctacttcatttgcggcggcttctttaccgtagcgcgcggcaatcccttctttttcacacagcaagttaaccgcttccgccagcccatacatgccaaacattggcacaaaacgttcagggttaatcagcccttctttcaccaggaagctattctcaaagaagtgactttgttgatagaggaattcacaccgcgcatcgatgatggcgatctgctgctggcagtagtgcggtagagtgcgcgtaaagaagtcatccaggctttcgctgcgctcggcaatggctttcaggttaaggcgtaccagcgtgctgccaccacccgccagcggcagactgttgtaacagctcacaatcccgtagcccccttttgtgaaaattttatcatgcaccggaccgttggcgatgtgcggtttgctacattcacagatgttcttcgccacttccagcagcaggtcatcaggggtgatttcaggatcgtagataaaggtcaggttcggactaacctgcttcaactctgcatctgcacgtaagatcgcgcgggtaatggggctatcagacgggccgatattggcgtgcataaaggcgtctggcagggttctgtcgaggtaacgccagaaacgttttattcgaacatcgatctcgtcttgtgttagaattctaacatacggttgcaacaacgcatccagttgccccaggtagaccggcatgcttgtgacgctcggtacgtggtggtaaagaatggtcagcagagagagtgcgtcatcaagatctttcgcgccttccagctccagccattcggaaccgttcgccagaaaacgggcgtaatcgggtaagacatagcgcggtttgtacggcgcatgaccttcaaacatatcgcagattacaccttcatccagcgcgcggcgggcttcggcaggaagctgtgggtaaggcagattgttttctgcttccagtgccagaaaatggcgcttctgctccgggctaagcactgggctggtgacaatttgctggcaacgttgttgcagtgcattttcatgagaagtgggcatcttcttttccttttatgccgaaggtgatgcgccattgtaagaagtttcgtgatgttcactttgatcctgatgcgtttgccaccactgacgcattcatttgaaagtgaattatttgaaccagatcgcattacagtgatgcaaacttgtaagtagatttccttaattgtgatgtgtatcgaagtgtgttgcggagtagatgttagaatactaacaaactcgcaaggtgaattttattggcgacaagccaggagaatgaaatgactgatctgaaagcaagcagcctgcgtgcactgaaattgatggacctgaccaccctgaatgacgacgacaccgacgagaaagtgatcgccctgtgtcatcaggccaaaactccggtcggcaataccgccgctatctgtatctatcctcgctttatcccgattgctcgcaaaactctgaaagagcagggcaccccggaaatccgtatcgctacggtaaccaacttcccacacggtaacgacgacatcgacatcgcgctggcagaaacccgtgcggcaatcgcctacggtgctgatgaagttgacgttgtgttcccgtaccgcgcgctgatggcgggtaacgagcaggttggttttgacctggtgaaagcctgtaaagaggcttgcgcggcagcgaatgtactgctgaaagtgatcatcgaaaccggcgaactgaaagacgaagcgctgatccgtaaagcgtctgaaatctccatcaaagcgggtgcggacttcatcaaaacctctaccggtaaagtggctgtgaacgcgacgccggaaagcgcgcgcatcatgatggaagtgatccgtgatatgggcgtagaaaaaaccgttggtttcaaaccggcgggcggcgtgcgtactgcggaagatgcgcagaaatatctcgccattgcagatgaactgttcggtgctgactgggcagatgcgcgtcactaccgctttggcgcttccagcctgctggcaagcctgctgaaagcgctgggtcacggcgacggtaagagcgccagcagctactaagtaagatgctttacgcctgatgcgctgcgcttatcaggcctacgagacgtatctacccgtaggccggataaggcgtagacgcatccggcaaaagccgcctcatactcttttcctcgggaggttaccttgtttctcgcacaagaaattattcgtaaaaaacgtgatggtcatgcgctgagcgatgaagaaattcgtttctttatcaacggtattcgcgacaacactatctccgaagggcagattgccgccctcgcgatgaccattttcttccacgatatgacaatgcctgagcgtgtcagcctgaccatggcgatgcgagatagtggaaccgttctcgactggaaaagcctgcatctgaatggcccgattgttgataaacactccaccggtggcgtcggcgatgtgactagcctgatgttggggccgatggtcgcagcctgcggcggctatattccgatgatctctggtcgcggcctcggtcatactggcggtacgctcgacaaactggaatccatccctggcttcgacattttcccggatgacaaccgtttccgcgaaattattaaagacgtcggcgtggcgattatcggtcagaccagtagtctggctccggctgataaacgtttctacgcgacccgtgatattaccgcaaccgtggactccatcccgctgatcaccgcctctattctggcgaagaaacttgcggaaggtctggacgcgctggtgatggacgtgaaagtgggtagcggcgcgtttatgccgacctacgaactctctgaagcccttgccgaagcgattgttggcgtggctaacggcgctggcgtgcgcaccaccgcgctgctcaccgacatgaatcaggtactggcctccagtgcaggtaacgcggttgaagttcgtgaagcggtgcagttcctgacgggtgaatatcgtaacccgcgtctgtttgatgtcacgatggcgctgtgcgtggagatgctgatctccggcaaactggcgaaagatgacgccgaagcgcgcgcgaaattgcaggcggtgctggacaacggtaaagcggcagaagtctttggtcgtatggtagcggcacaaaaaggcccgaccgacttcgttgagaactacgcgaagtatctgccgacagcgatgctgacgaaagcagtctatgctgataccgaaggttttgtcagtgaaatggatacccgcgcgctggggatggcagtggttgcaatgggcggcggacgccgtcaggcatctgacaccatcgattacagcgtcggctttactgatatggcgcgtctgggcgaccaggtagacggtcagcgtccgctggcggttatccacgcgaaagacgaaaacaactggcaggaagcggcgaaagcggtgaaagcggcaattaaacttgccgataaagcaccggaaagcacaccaactgtctatcgccgtatcagcgaataacggtatactgatctgatcatttaaatttgaagcactgagtacggagaacatatgaaacgtgcatttattatggtgctggacagtttcggcatcggcgctacagaagatgcagaacgctttggtgacgtcggggctgacaccctgggtcatatcgcagaagcttgtgccaaaggcgaagctgataacggtcgtaaaggcccgctcaatctgccaaatctgacccgtctggggctggcgaaagcacacgaaggttctaccggtttcattccggcgggaatggacggcaacgctgaagttatcggcgcgtacgcatgggcgcacgaaatgagttccggtaaagataccccgtctggtcactgggaaattgccggtgtcccggttctgtttgagtggggatatttctccgatcacgaaaacagcttcccgcaagagctgctggataaactggtcgaacgcgctaatctgccgggttacctcggtaactgccactcttccggtacggtcattctggatcaactgggcgaagagcacatgaaaaccggcaagccgattttctatacctccgctgactccgtgttccagattgcctgccatgaagaaactttcggtctggataaactctacgaactgtgcgaaatcgcccgtgaagagctgaccaacggcggctacaatatcggtcgtgttatcgctcgtccgtttatcggcgacaaagccggtaacttccagcgtaccggtaaccgtcacgacctggctgttgagccgccagcaccgaccgtgctgcagaaactggttgatgaaaaacacggccaggtggtttctgtcggtaaaattgcggacatctacgccaactgcggtatcaccaaaaaagtgaaagcgactggcctggacgcgctgtttgacgccaccatcaaagagatgaaagaagcgggtgataacaccatcgtcttcaccaacttcgttgacttcgactcttcctggggccaccgtcgcgacgtcgccggttatgccgcgggtctggaactgttcgaccgccgtctgccggagctgatgtctctgctgcgcgatgacgacatcctgatcctcaccgctgaccacggttgcgatccgacctggaccggtactgaccacacgcgtgaacacattccggtactggtatatggcccgaaagtaaaaccgggcagtctgggtcatcgtgaaaccttcgcggatatcggccagactctggcaaaatattttggtacttctgatatggaatatggcaaagccatgttctgatggatttgggcggagcgttgactccgcctttgttatgtcacaaaaaggataaaacaatggctaccccacacattaatgcagaaatgggcgatttcgctgacgtagttttgatgccaggcgacccgctgcgtgcgaagtatattgctgaaactttccttgaagatgcccgtgaagtgaacaacgttcgcggtatgctgggcttcaccggtacttacaaaggccgcaaaatttccgtaatgggtcacggtatgggtatcccgtcctgctccatctacaccaaagaactgatcaccgatttcggcgtgaagaaaattatccgcgtgggttcctgtggcgcagttctgccgcacgtaaaactgcgcgacgtcgttatcggtatgggtgcctgcaccgattccaaagttaaccgcatccgttttaaagaccatgactttgccgctatcgctgacttcgacatggtgcgtaacgcagtagatgcagctaaagcactgggtattgatgctcgcgtgggtaacctgttctccgctgacctgttctactctccggacggcgaaatgttcgacgtgatggaaaaatacggcattctcggcgtggaaatggaagcggctggtatctacggcgtcgctgcagaatttggcgcgaaagccctgaccatctgcaccgtatctgaccacatccgcactcacgagcagaccactgccgctgagcgtcagactaccttcaacgacatgatcaaaatcgcactggaatccgttctgctgggcgataaagagtaattgtgtttcgctgcaaggcgattgccttgtgaagccggagcgggagactgctccggctttttagtatctattcatttttctctccagcttgaatattttcgctatacttttcagtgaaatgtgttaataaatctattcaagtatctattcacgaatctattcattaatgagcgagctgactgatcttttactgcaagggccgcgttctgccccggaattgcgccagcgtctggcaatcagtcaggcgacgttcagtcgccttgttgccagagaagatcgggtgattcgctttggtaaagcacgggcaacgcgatatgcactgctgcgtccttatcgcggaattgagcgtattcccgtctggcgggtggacgataccggaaaggcgcataaattcgccgacatccggttgtgctggccgcagggaagttgtctggtaacaggcgcagatggcgacgaacagtggtttgatggtttgccctggtatttgaccgatctccgaccgcagggctttttagggcgcgcgtggggcaggaagttagccgcgcaactgaatctgactgatgatatacgtctctggcaggaagaagatgtgctctacgccctgaccgtatttaacggtgaatatactggcggttggttggtcggggaggggaattatcagcgatggattactgcacaacaccctgcggaaattcctctggatcaaaaactcacccattacgaacagctggcaagtgatgcactggcaggagaaattgtgggttcttctgcgggcggcgagcagccaaaatttacctactatgcacaaacgccgagtggcaataaacatgtgttggtgaaattcaccgtaccacagcaaaccgcggtcagccaacgttggggtgacctgctaattgctgaatctattgccgcgcaaatcctgcgtgacggtgggatccacgccatcgagagtacggtgcttgtaacaagtaacaggcaggtattcctcgaagcggaacgctttgactgcaaaggtaacgatggtcgcttgcctattgtgagcctggaggcggtgcagagtgagtttatctcttctccgggaagctggccgcaggcaatgcgccgtttgtgtgagcaacaacttgtcactcaccagagcgtggcgcaaacagaagtgatctgggcatttgggcgacttatcgccaacagcgatatgcacgcaggtaatttaagcttttatttatctgaaccgccatttgcgctgacgcccgtctacgacatgctgccgatggtctatgcaccaaacagcgctggaatgctgcgtgatgctgccattgaggtgaagtttgatcttaacgtcagtaaaagcgcttggttaacggcgatcccgctggcgcagcagttctggcaaacggtcgccagagatccgcgtatcagcgaggcgtttcgccacattgcgcaagaaatgccggaaaaaatccggcaaatcgaagagaaagttgcccgcatgggcgggtaattaccttacagcccccgccatccatgcgcttaactcccgtagctctttttcctgttccgggaagtcaaccaacagcgcttcgcactcctgttgcagcatatctgcgcggtacaggcagccttgcagtcgtccggcgagggcttccagcggcgcggggttgaggctgtcggtaaacacctgggcgcgggtgatatggcctttttcaacgtcgaaatgcagttccacgccgccccaggtaaagcgttcatccagcagatggctgaatgccggagcctgaccgaagttccattcccagctactctggcgggcaaaggtttcggcgaagtttggcaagtctggcgttttgttcggggagatgatttccgcttccacgcgctcgccataatgggcgaaaaaggcctcggttatggcctcgcaaacctgctcatgggtgatccccggcaacagctcggtgaggttggtcacgcgggaacgtacgctcgtaatgcctttcgccgccagtttctttttatccggattgagatagtttgccaggcggctgaggtcggcattgagtagcaaggtgccgtggtggaagccgcgatctttggtttcgcgataggcgctgccactgactttgcggtcgccttcgacggttttcaccaccagatcgttacgtccggacgcttcggcgctgacgccgagcgcgttcagcgcattgagcacaatgctcgtggagatagttttatcgtactccggcttgccagccataaaggtaaagcaggtattgccgagatcgtggaacaccgcgccgccaccgctactgcgccgcgccaggcggacgttatcttcttccatccgccgggtattacactctttccacgggttctgcgcgcgaccaattactaccgtgtcggcattgcgccagagaaacagaacgcgctgcgtggcgggcatttggcgaaaaatacactcttccaccgccaggttaaaccacgggtcgtaagagtcagagatgagcaggcgtaatgtggacataacgatttcctttcttgtagtaatgggtcactcttttttctcgctttcttcctcttccggcaccggtttgctggcggctaacaggaaggggctttgctgccagcgggtgcgtttaccctgtagcagcgtgcgggtcagcactacaccgattgccagactgagcagcaacatcaggcgtaaaatgttagtggtgttatccacctgttgggcttcggtggcgagcgtatgggtgtcgagtgtcaggcgcagatagccgagcggtccgtttttacccgcaattggctcgacaatctgctggttaaaatagccgcctgcttttttaccgtcgagcgccagccggtcgcgcacttcgacgctttcgccagaacgtgcgataagatcgccttgttcgtcatacacacccgcgtcgaggatacggctttcatccgttaactgatcgaggatcgcctgaatgcgtttttcatccggactgtcggtacgcatcagcggtgcaacgttcagcgtcacctgacgcgccagggtgcgggccagttcttccagctgtggattacgctgtcgctggtggttttgactaaaccaactcgctccctgcatcagcgccactaacaaggcaagacagaacaggacaatcactgcccgatgcagccggaatttcagttttgtgcgagccatcttccaccctttgaaaatttgagacttaatgttgccagaagcaatggatacaaggtagcctcatgcgttattttccctgcttcgaacgattttacaggagccttaatgcctaacattacctggtgcgacctgcctgaagatgtctctttatggccgggtctgcctcttagtttaagtggtgatgaagtgatgccactggattaccacgcaggtcgtagcggctggctgctgtatggtcgtgggctggataaacaacgtctgacccaataccagagcaaactgggtgcggcgatggtgattgttgccgcctggtgcgtggaagattatcaggtgattcgtctggcaggtagtctcaccgcacgggctacacgcctggcccacgaagcgcagctggatgtcgccccgctggggaaaatcccgcacctgcgcacgccgggtttgctggtgatggatatggactccaccgccatccagattgaatgtattgatgaaattgccaaactggccggaacgggcgagatggtggcggaagtaaccgaacgggcgatgcgcggcgaactcgattttaccgccagcctgcgcagccgtgtggcgacgctgaaaggcgctgacgccaatattctgcaacaggtgcgtgaaaatctgccgctgatgccaggcttaacgcaactggtgctcaagctggaaacgctgggctggaaagtggcgattgcctccggcggctttactttctttgctgaatacctgcgcgacaagctgcgcctgaccgccgtggtagccaatgaactggagatcatggacggtaaatttaccggcaatgtgatcggcgacatcgtagacgcgcagtacaaagcgaaaactctgactcgcctcgcgcaggagtatgaaatcccgctggcgcagaccgtggcgattggcgatggagccaatgacctgccgatgatcaaagcggcagggctggggattgcctaccatgccaagccaaaagtgaatgaaaaggcggaagtcaccatccgtcacgctgacctgatgggggtattctgcatcctcagtggcagcctgaatcagaagtaattgctcgcccgccatcctgcgggcggcacagcattaacgaggtacaccgtggcaaaagctccaaaacgcgcctttgtttgtaatgaatgcggggccgattatccgcgctggcaggggcagtgcagtgcctgtcatgcctggaacaccatcaccgaggtgcgtcttgctgcgagcccaatggtggcgcgtaacgagcgtctcagcggctatgccggtagcgccggggtggcaaaagtccagaaactctccgatatcagccttgaagagctgccgcgtttttccaccggatttaaagagttcgaccgcgtactaggcggcggcgtggtgccaggaagtgccattctgattggcggtaaccctggtgcggggaaatccacgctgctactgcaaacgctgtgcaaactggcccagcagatgaaaacgctgtatgtcaccggcgaagagagcctgcaacaggtggcaatgcgcgctcatcgccttggcctgccgactgacaatctcaatatgttgagcgaaaccagcatcgaacagatctgcctgattgccgaagaagagcaaccgaagctgatggtaattgacagcatccaggtgatgcatatggcggatgtacagagtagccctggtagcgtggcgcaggtgcgtgaaacggcggcttatttgacacgcttcgccaaaacgcgcggtgtggcgattgtcatggtggggcacgtaaccaaagatggtagcctggctggcccgaaagtgctggaacactgtatcgactgtagcgtgcttttggatggcgatgccgactcccgttttcgcaccttgcgcagccataaaaaccgcttcggcgcggtgaatgagctgggcgtcttcgcgatgaccgaacaggggctgcgtgaagtcagcaaccctagcgcaattttcttaagtcgcggcgatgaagtgacctccggtagcagtgtgatggtggtatgggaaggaacgcgtccactgctggtggagattcaggcgctggtcgatcacagcatgatggcgaacccacgccgcgtggcagtggggctggaacaaaaccgtctggcaatcctgctggctgtgttgcaccgtcacggtggtctgcaaatggccgatcaggatgtgtttgtgaacgtggtcggcggcgtgaaggtaaccgaaaccagtgccgacttagcgttactgctggcgatggtttccagcctgcgcgacagaccgctgccgcaggatctggtggtgtttggtgaagtcgggctggcaggggagatccgcccggtgcccagcggtcaggaacgaatctctgaagcggcgaaacacggttttcgccgggcgattgttccggcggctaacgtgccgaaaaaagcgccggaagggatgcagatttttggcgttaaaaaactctccgacgcgcttagcgtgttcgacgacttataatgagatatacggagggagatatgagcagttttgattacctgaaaactgccatcaagcaacagggctgcacgctacagcaggtagctgatgccagcggtatgaccaaagggtatttaagccagttactgaatgccaaaatcaaaagccccagcgcgcaaaagctggaggcgttgcaccgttttttggggcttgagtttccccggcagaagaaaacgatcggtgtcgtattcggtaagttctacccactgcataccggacatatctaccttatccagcgcgcctgtagccaggttgacgagctgcatatcattatgggttttgacgatacccgtgaccgcgcgttgttcgaagacagtgccatgagccagcagccgaccgtgccggatcgtctgcgttggttattgcaaacttttaaatatcagaaaaatattcgcattcatgctttcaacgaagagggcatggagccgtatccgcacggctgggatgtgtggagcaacggcatcaaaaagtttatggctgaaaaagggatccagccggatctgatctacaccagcgaagaagccgatgcgccacagtatatggaacatctggggatcgagacggtgctggtcgatccgaaacgtacctttatgagtatcagcggtgcgcagatccgcgaaaacccgttccgctactgggaatatattcctaccgaagtgaagccgttttttgtgcgtaccgtggcgatccttggcggcgagagcagcggtaaatccaccctggtaaacaaacttgccaatatcttcaacaccaccagtgcgtgggaatatggccgcgattatgtctttagtcacctcggcggtgatgagatcgcattgcagtattctgactacgataaaatcgcgctgggccacgctcaatacattgattttgcggtgaaatatgccaataaagtggcatttatcgataccgattttgtcaccactcaggcgttctgcaaaaagtacgaagggcgggaacatccgttcgtgcaggcgctgattgatgaataccgtttcgatctggtgatcctgctggagaacaacacgccgtgggtggcggatggtttacgcagcctcggcagtagcgtggatcgcaaagagttccagaacttgctggtggagatgctcgaagagaacaatatcgaatttgtgcgggttgaagaggaagattacgacagtcgtttcctgcgctgcgtggaactggtgcgggagatgatgggggagcagagataaccgtgatgaaactgctcaaaggcgaggtataaaatgagtttttttgatgagttgaaaacctctctggaagaggctgtcgagattaaacaaggtttgaaaaaacctgcacgggtgacccgccacgaaattgaggatgctaaggctgttgtagaccggaaacggtgttcacgccgcatccggcattcggtgctcaatgcctgatgcgacgcttaccgcgtcttatcaggcctacagttttacaacgtattgaaattgctggttttgtaggccggataaggcgttcgcgccgcatccggcattttacgcattacttcgcaatacgcttgtacttgatacgcttcggctccagcgcgtctgcgcccagcgtgcgtttcttgtactcttcgtactcggtaaagttaccttcgaagaactcaactttaccttcatcctggtaatccagaatgtgcgtggcgatacggtcgaggaaccaacggtcgtggctgataaccatcgcacagcccgggaactccagcagggcgttttccagcgcgcgcagggtttcgatatccaggtcgttggttggttcgtcgagcagcagcatgttgccgccaacctgcagcagcttcgccagatgcagacgaccgcgctcaccaccggagagttcaccaacgcgtttaccctgatcaacccctttaaagttaaagcggccaacgtaggcgcggcttggcatctcggtgttgccgatcttcatgatatccagcccgccggaaacttcttcccaaacggttttgctgttatccatactgtcacggaactgatcaacgctcgccagtttcaccgtttcacccaaagtgatggtgccgctgtccggctgttcctgaccagagatcatacggaacagggtgcttttacccgcaccgttcggaccgatgatcccgacgatcgctcctttcgggatgctgaagctcaggtcatcaatcagcagacgatcgccataggatttacgcaggttgctgacttccagcactttatcgcccagacgcggtccaggtggaataaacagttcgttggtttcgttacgtttctgatattcggtgctgttcagttcttcaaagcgcgccagacgtgctttacctttgctctgacggcctttagtaccttgacgtacccattccagctctttctcaatgctcttacgacgcgccgcttcttgactagcttcctgcgccaggcgctgatctttctgctccagccaggaggagtagttaccttcccacggaataccttcaccgcggtcaagttcgaggatccagcctgcaacgttatcgaggaagtaacggtcgtgggtaatcgccacaacggtgccttcgaagtcgtgcaggaagcgttccagccaggccacggattcggcatccaggtggttggtcggttcgtcgagcagcagcatgtctggtttttccagcagcaggcggcacaacgctacgcgacgacgttcaccaccggagaggttagcgattttcgcgtcccagtccggcagacgtagcgcatccgccgcacgctccagctgtacgttcagattatgaccgtcgtgagcctgaatgatctcttccagacggccttgttcagcggccagcttgtcaaaatcggcatccggatcggcgtacagcgcatacacttcatccaggcgtttcagggcgttaaccacttcactaaccgcttcttcaatggactcacgcacggtgtgttccgggttcagctgcggttcctgcggcagataaccaatcttgatgtctggctgcggacgcgcttcaccttcgatgtctttatcaatgcccgccataatgcgcagcagggtggacttacccgcgccattcagacccaggacaccaatttttgccccagggaagaaactcagagagatgtttttcaaaatatgacgtttcggcggaacaactttgccgacacgatgcatggtataaacgaattgagccacgttggacttcgcctctatgtttatcgtgataatgagttttcaaaggcgaagtgtagcctttttccccgcctaatcccagccggtcgatcaccctcgcagtaaaagtaaaaaagtgtccgtaacgtggcgtaaacggcaatgactggttagcataaatctattacgcggcatgacgctgcattgatgtatttacacttagaggatgcgcttgtggaaaaagccaaacaagttacctggcggctgttggctgccggtgtctgtctgctgacggtcagcagcgtggcgcgagccgacagtctggatgagcagcgtagtcgttacgcgcaaatcaagcaggcctgggataatcgacaaatggatgtggtcgaacaaatgatgcctggactgaaggattatccgctttatccctacctggaataccgccagatcaccgatgatctgatgaatcaaccggcggtgacggtcactaactttgttcgcgctaaccccacgcttcctcccgctcgcacgctgcaatctcgtttcgtcaatgaactggcgcggcgtgaagactggcgtggcttgttagcctttagcccggaaaagcccggaactaccgaagcgcaatgtaattactactatgcgaaatggaacaccgggcagagtgaagaagcctggcaaggggcgaaagagctgtggctaaccggcaagagccagcctaacgcctgtgacaagttatttagcgtctggcgtgcgagtggtaaacaagatccgctggcgtatttagagcgtatccgtctggcgatgaaagcgggtaacacaggcctggtaacagtgctggcagggcagatgcctgccgattaccagactatcgccagcgcaatcattagtctggcgaacaaccctaatacggtactgaccttcgcgcgtacaactggcgcgaccgattttacccgtcaaatggcggcggtggcgtttgccagtgtggcgcggcaggatgctgagaatgcacggctgatgatcccaagccttgcccaggcgcagcagcttaatgaagatcagattcaggagctgcgcgatatcgtcgcctggcgtttgatgggcaacgatgtcaccgacgagcaggcgaaatggcgcgatgacgccattatgcgcagccaatctactagccttattgaacgccgtgtacgaatggcgcttggcaccggcgatcgtcgcggcctgaatacctggctggcgcgtctgcctatggaagcgaaagagaaagatgaatggcgttactggcaggcggatttattgctggaacgcggacgtgaagctgaagcaaaagagattttgcatcaactcatgcaacagcgtggtttctacccgatggttgcagcacaacgcatcggcgaagagtatgagctgaagattgataaagcgccgcagaatgttgacagcgccctgactcaggggccggagatggcgcgcgtgcgcgagttgatgtactggaatctcgataataccgcgcgtagcgagtgggccaatctggtgaagagcaagagtaaaacagagcaggctcaactggcgcggtatgctttcaacaaccaatggtgggatcttagcgttcaggcaacgatcgccgggaagctgtgggatcatctggaagagcgattcccgctggcttacaacgatcttttcaaacgctacaccagcggtaaggagatcccgcaaagctatgcgatggcgattgctcgtcaggagagcgcctggaatccgaaagtgaaaagtccggtaggggccagcggcttgatgcagattatgcctggtacagcgacccatacggtgaagatgttctctattcccggttatagcagtcctgggcaattgctggatccggaaacgaatatcaacattggcaccagttacctgcaatatgtttatcagcagtttggcaataatcgtattttctccagtgcagcttataacgccggaccagggcgggtgcgaacctggcttggcaacagcgccgggcgtatcgacgcagtggcatttgtcgagagtattccattctccgagacgcgcggttatgtgaagaacgtgctggcttatgacgcttactaccgctatttcatgggggataaaccgacgttgatgagcgccacggaatggggacgtcgttactgatccgcacgtttatgatatgctatcgtactctttagcgagtacaaccgggggaggcattttgcttcccccgctaacaatggcgacatattatggcccaacaaagtccctatagtgcagcgatggcagaacagcgtcaccaggagtggttacgttttgtcgacctgcttaagaatgcctaccaaaacgatctccatttaccgttgttaaacctgatgctgacgccagatgagcgcgaagcgttggggactcgcgtgcgtattgtcgaagagctgttgcgcggcgaaatgagccagcgtgagttaaaaaatgaactcggcgcaggcatcgcgacgattacgcgtggatctaacagcctgaaagccgcgcccgtcgagctgcgccagtggctggaagaggtgttgctgaaaagcgattgattttgtaggcctgataagacgtggcgcatcaggcatcgtgcaccgaatgccggatgcggcgtgaacgccttatccgtcctacaaatacccgtaatttcaatatgtttggtaggcatgataagacgcggcagcgtcgcatcaggcgcttaatacacggcattatgaaacggactcagcgccaggatcaccgcctggtgatagacgctggcgcgagtgagtttcccggcggtaaacacgccgatcgccccttccttacgaccaatctcatcaataccggtataacggctcatcacgggaccaagcgcctcaccttcacgcactttttccagaatcaccgcaggcaacggcaaagtagcgctacgcgcctcgccgcgctggctggcgttttcaatcaccacccaactgaaagtgctgtcaccatcgatgccagcttcaatcgccacccaaaaatcagcctctggaagtaaacggcgggcattggctacccgatttcgtgcgccagcgcgcgtttcctcactgccaaagggctgttccggtacaccgctctcgacggcaacggatgcaatatggcaggatccttcgccgaagatctcgtgaaatgcctgcagaatggcctgaattttagcgggattggtggtcgcacagacaacttggtgcataatcagcattactcagaaaattaacgttacagcagtatacggaaaaaaagcatgttacaggtatacctagtccgccacggtgaaacgcagtggaacgccgagcgacgtattcagggccagtctgacagcccgctgaccgccaaaggtgagcaacaggcgatgcaggtggcaacccgtgccaaagagcttggcattacgcatatcatcagtagcgatttaggacgcacccggcgtacggcggaaatcatcgcccaggcctgcggctgtgacatcatctttgattctcgcctgcgtgaattaaacatgggtgtgctggaaaaaagacatatcgattctctgaccgaagaagaagagaactggcgtcggcagctggtcaatggcaccgttgacgggcgtattcctgaaggcgagagtatgcaggagctcagcgatcgcgtcaatgcggcactggaatcttgccgggacttaccgcagggaagccgaccgctgctggtgagtcatggtattgcactgggatgcctggtgagtacgattctcggattaccagcatgggcagagcgccgcttacgtctgcgtaactgttctattagccgcgtggattatcaggaaagcctgtggctggcgtctggctgggtcgttgaaaccgcaggggacatcagccatctggacgcccctgcattagatgagctgcagcgttaacgacggatcggaatcagcagttcacagcgtagattaattgggcgatctcccgctttggcatcttctgccgggtagtatcgctcaatatcctgacctttacggcgcgtcaggttgagcattggcatgcacgttccgtataccgtcaggataaactcctgcacgccggttcccagaccttcataggtaaacatcacatattcgccgccctgcagcatcaccggatgccccgtcagtacatagccatctgcctgatcctgggctaacgcggtggtatagaatacctcttgctcgtcgtctttatcctgactcggacgcgtttcattcaggccgtagagcaccggcggaatggtcggcgcgttgccgagaaaatcgtgccagaactgataacgcatttcatggcggaaatcagagatttgctccaggctacaggagtagctctgggtaacaccaatcagcggcgtatcttccagggtgacaaatttgtgctctggcatagtgaattcacccaggcgtagcggcgggcgaataccaaaggcgctccattcaggagaacggcggtaaagtgcaggagtctgggcaaactgcttcttgaatgcgcgggtaaatgtctgttgagagtcgaagcggtattgcagcgcgatgtccagaatcggacgcgcagtcaggcgtagtgcgaccgcgcttttgctcaaacgacgagcacgaatatacgcgccaatagcatggccagtgacatctttaaacattctctgtaagtgccacttggaataacctgctttcgccgctacattgtcgaggctcaggggctgatccagatgaccttccagccagattaaaaggtcgcgaataatgccggcctgatccataaaatatcctcatcctttcaacaacgagcacctgacatcaggtaattggataatagcattttttgctgttttagcattcagtgtttttttcttagtagagtatgttttagggcttgacggaaataaaagtattgagattttgttcttaatcaatatgttatttaccgtgacgaactaattgctcgtgtaatagataaaaatggtaacaatatgaaatacaagcatttgatcctgtctttaagcctgataatgctggggccattggctcatgcagaagagattggtagcgtcgacaccgtatttaaaatgatcggcccggatcacaaaattgttgtggaagcctttgatgatcccgatgtgaaaaatgtcacctgttatgtgagccgggcgaaaaccggtggtattaaagggggattgggtctggcggaagatacctccgatgcggccatttcttgtcagcaagtcgggccgattgaactgagcgatcgtattaaaaacggcaaagctcagggcgaggtagtattcaaaaaacgcacgtccctggtctttaagagcttacaggtcgtgcgcttttatgatgccaaacgcaacgcgctcgcttatctggcttactccgacaaagttgtagaaggtagcccgaaaaacgcgattagcgcggttcctgtcatgccgtggcggcaataacagaggcgatttatgcaacgggaaacggtctggttagtggaagatgagcaagggatagccgacacgctggtctacatgttgcagcaggaaggttttgccgtcgaggtctttgagcgaggcttgccggtgctggataaagctcgcaagcaggtacccgacgtcatgattctcgatgttggtctgccggatattagcggctttgaattgtgccgccagttactggcgctccatccggcgttacctgtactgttcctgacggcccgaagtgaagaggtcgatcgcctgcttgggctggaaattggtgctgacgactacgtggctaaaccgtttagtccccgcgaagtgtgcgccagggtgcgcaccttactgcgtcgggtgaagaagttcagcacgccgtctcccgtcatccgtattggacattttgaattgaatgaacccgcggcgcagatcagctggtttgacacgccattagcgctgactcggtatgagtttttattgttgaagacgttactcaagagtccgggccgcgtctggtcccgccagcaactgatggatagcgtatgggaagatgcgcaggacacctacgatcgcaccgtcgatacccacattaaaacgctgcgtgccaagctgcgcgccatcaaccccgatcttagtccgattaatactcatcgcggcatgggatatagcctgaggggcctgtaatgcgtatcggcatgcggttgttgctgggctattttttactggtggcggtggcagcctggttcgtactggccatttttgtcaaagaagttaaaccgggcgtgcgaagagcaacggaggggacgttgatcgacaccgcaacgttgctggcggagctggcgcgtcccgatttgctctctggggacccaacgcatgggcaactggcgcaggcgtttaatcagctacaacatcgcccgtttcgcgccaatatcggtggcattaacaaagtgcgcaatgaatatcatgtctatatgaccgatgcgcagggcaaagtattgttcgatagcgcaaataaagccgttggacaggattatagccgctggaatgacgtctggctaacgttgcgtggtcagtatggtgcgcgcagcacgttgcaaaatcctgccgatcccgaaagttctgtgatgtatgttgccgcaccgattatggacggcagccggcttattggcgttttgagcgtaggcaaaccgaacgcggcgatggctccggtcattaagcgtagcgagcggcgaattttatgggccagcgccattttgttggggattgcactggtgattggcgcaggcatggtttggtggatcaaccgctctattgcccggctcactcgctatgctgattccgtcactgacaataagcccgttcctctccccgatctcggtagtagcgagttgcgtaaactcgcgcaggcgctggaaagtatgcgcgtgaagctggaagggaaaaactatattgagcagtatgtttacgcattaactcatgagctaaaaagcccactggcggcgattcgtggagcggcggaaattttacgcgaaggtccgccgccggaagtggtggctcgttttactgacaacattctgacgcaaaatgcgcgtatgcaggcattggtagaaacgttactacgccaggcaagactggagaatcgtcaggaagtcgttctgactgctgttgatgtggcggcattattccgccgcgtcagcgaagcgcgcaccgtgcagttggcagaaaaaaaaatcactctgcatgttacgcccaccgaggttaacgttgctgctgaaccggcgttactggagcaggcgctgggaaatttactggataacgccatcgattttacccccgagagcggttgcatcacgctaagcgccgaagtggatcaggaacacgtcacgcttaaggtgctggataccggtagtggtattcctgactacgcgcttagtcgtatttttgaacgcttttactctttgcctcgtgcaaatgggcaaaaaagcagcggtctggggttggcgttcgtcagtgaggtcgcccgtttgtttaacggcgaagtcacgctgcgcaacgtgcaggaaggtggcgtgctggccagccttcgacttcaccgtcacttcacataacttcaaattcttcccacatagtcttcgtatcctgctgccattgcaaaggagaagactatgttgaaatcccccctgttctggaaaatgactagcctgtttggtgcagtattgctgttgttgattccgataatgctgattcggcaggtgattgtcgaacgtgctgattaccgtagcgatgtggaagatgcgattcgccaaagtaccagcgggccgcaaaaactcgttgggccgctcatcgctattcctgtgaccgagctttatacggtgcaggaagaggataaaaccgtggagcggaaacgaagttttatccatttttggttacctgagagtttgatggttgatggcaatcagaacgtggaagaacgcaagatagggatttataccggtcaggtctggcacagtgatttaacgttaaaagccgatttcgatgttagccgtcttagcgaactcaacgcgccaaatatcaccttaggcaagccatttattgtgattagcgtcggggatgcgcgtggtattggtgtggtgaaagcgcctgaagttaacggaacggcgctgaccattgaacccggcaccgggttagagcaaggcgggcagggcgtgcatatccctttacctgaaggggactggcggaagcagaacctgaagctgaatatggccctgaatttaagcggtaccggcgatctttctgtggtgcctggcgggcgtaatagcgaaatgaccttaaccagcaactggccgcatcccagttttttaggtgattttctaccagccaaacgggaagttagcgagagtggttttcaggcgcactggcaaagcagctggtttgctaataatctcggtgagcgttttgctagtggcaatgataccggctgggaaaacttcccggcgtttagcgtcgcagtaacgacgccagccgatcaataccaattaactgaccgggcgactaagtacgccattctgctgattgcactgacttttatggcgttctttgtttttgaaacgctcaccgcgcaacgtttacacccaatgcaatatttgctggtggggcttagtttggtgatgttttatttgctcttgctggcgctttctgaacataccggttttaccgtggcatggataatcgccagtctgattggggcgataatgaacggtatttatttgcaagcggtattgaaaggttggtgcaacagcatgttgtttaccctcgcgctgttgttgctggatggtgtgatgtggggactgctcaactctgccgatagcgcgctgttgttgggaaccagtgtgctggtggtggcgctggccggcatgatgtttgtgacccgtaatatcgactggtatgcgtttagtctgccgaaaatgaaagccagtaaagaagttacaacggacgatgagttacgtatctggaaataaggttgaaaaataaaaacggcgctaaaaagcgccgttttttttgacggtggtaaagccgattaatcttccagatcaccgcagaagcgataaccttcaccgtgaatggtggcgatgatttccggcgtatccggcgtagattcgaaatgtttacgaatacggcggatcgtcacgtctacagtacggtcgtgcggtttcagctcacggccggtcattttcttcagcagttcagcacgggactgaattttgcctgggttttcacagaagtgaagcatggcgcggaactcgctgcgcggcagcttgtactgctcgccatcagggccgatcaagctacggctgttgatgtccagttcccaaccattgaacttgtagctttcaacgctacgacgttcttcgctgacagtacccagattcatggtacgggacagtaggttgcgtgcacgaatcgtcagttcacgcgggttgaacggtttggtgatgtagtcatctgcaccgatttcgaggccgagaattttatcgacttcgttgtcacggccagtcaggaacatcaacgcaacattcgcctgctcgcgcagttcacgcgctaacagaagaccgttcttacccggcagattgatatccatgatcaccaggttgatgtcatattcagagaggatctgatgcatttccgcgccatctgtcgcttcgaaaacatcatagccttccgcttcgaaaatacttttcaacgtgttgcgtgttaccaactcgtcttcaacgataagaatgtgcggggtctgcatgtttgctacctaaattgccaactaaatcgaaacaggaagtacaaaagtccctgacctgcctgatgcatgctgcaaattaacatgatcggcgtaacatgactaaagtacgtaattgcgttcttgatgcactttccatcaacgtcaacaacatcattagcttggtcgtgggtactttccctcaggacccgacagtgagtaaaacggctgtcatcctaaccattttaacagcaacataacaggctaagaggggccggacacccaataaaactacgcttcgttgacatatatcaagttcaattgtagcacgttaacagtttgatgaaatcatcgtatctaaatgctagctttcgtcacattattttaataatccaactagttgcatcatacaactaataaacgtggtgaatccaattgtcgagatttattttttataaaattatcctaagtaaacagaaggatatgtagcattttttaacaactcaaccgttagtacagtcaggaaatagtttagccttttttaagctaagtaaagggctttttctgcgacttacgttaagaatttgtaaattcgcaccgcgtaataagttgacagtgatcacccggttcgcggttatttgatcaagaagagtggcaatatgcgtataacgattattctggtcgcacccgccagagcagaaaatattggggcagcggcgcgggcaatgaaaacgatggggtttagcgatctgcggattgtcgatagtcaggcacacctggagccagccacccgctgggtcgcacatggatctggtgatattattgataatattaaagttttcccgacattggctgaaagcttacacgatgtcgatttcactgtcgccaccactgcgcgcagtcgggcgaaatatcattactacgccacgccagttgaactggtgccgctgttagaggaaaaatctagttggatgagccatgccgcgctggtgtttggtcgcgaagattccgggttgactaacgaagagttagcgttggctgacgttcttactggtgtgccgatggtggcggattatcctagcctcaatctggggcaggcggtgatggtctattgctatcaattagcaacattaatacaacaaccggcgaaaagtgatgcaacggcagaccaacatcaactgcaagctttacgcgaacgagccatgacattgctgacgactctggcagtggcagatgacataaaactggtcgactggttacaacaacgcctggggcttttagagcaacgagacacggcaatgttgcaccgtttgctgcatgatattgaaaaaaatatcaccaaataaaaaacgccttagtaagtatttttc
